United States Patent Application Publication US 2023/0183706 A1 - sequence listing, part 2

SEQ ID NO: 2787 - RNA, 23 nt, synthetic construct
  source 1..23: mol_type = other RNA; note = Description of Artificial Sequence: Synthetic oligonucleotide
  modified_base 1: mod_base = OTHER; note = 2'-O-methyluridine-3'-phosphorothioate
  modified_base 2: mod_base = OTHER; note = 2'-fluoroadenosine-3'-phosphorothioate
  modified_base 3: mod_base = OTHER; note = 2'-O-methyluridine-3'-phosphate
  modified_base 4: mod_base = OTHER; note = 2'-O-methyluridine-3'-phosphate
  modified_base 5: mod_base = OTHER; note = 2'-O-methylguanosine-3'-phosphate
  modified_base 6: mod_base = OTHER; note = 2'-fluorocytidine-3'-phosphate
  modified_base 7: mod_base = OTHER; note = 2'-O-methyluridine-3'-phosphate
  modified_base 8: mod_base = OTHER; note = 2'-fluorouridine-3'-phosphate
  modified_base 9: mod_base = OTHER; note = 2'-fluorouridine-3'-phosphate
  modified_base 10: mod_base = OTHER; note = 2'-O-methyladenosine-3'-phosphate
  modified_base 11: mod_base = OTHER; note = 2'-O-methylguanosine-3'-phosphate
  modified_base 12: mod_base = OTHER; note = 2'-O-methylcytidine-3'-phosphate
  modified_base 13: mod_base = OTHER; note = 2'-O-methylcytidine-3'-phosphate
  modified_base 14: mod_base = OTHER; note = 2'-fluoroadenosine-3'-phosphate
  modified_base 15: mod_base = OTHER; note = 2'-O-methylcytidine-3'-phosphate
  modified_base 16: mod_base = OTHER; note = 2'-fluoroadenosine-3'-phosphate
  modified_base 17: mod_base = OTHER; note = 2'-O-methyluridine-3'-phosphate
  modified_base 18: mod_base = OTHER; note = 2'-O-methyladenosine-3'-phosphate
  modified_base 19: mod_base = OTHER; note = 2'-O-methyluridine-3'-phosphate
  modified_base 20: mod_base = OTHER; note = 2'-O-methylguanosine-3'-phosphate
  modified_base 21: mod_base = OTHER; note = 2'-O-methylcytidine-3'-phosphorothioate
  modified_base 22: mod_base = OTHER; note = 2'-O-methyladenosine-3'-phosphorothioate
  modified_base 23: mod_base = OTHER; note = 2'-O-methylguanosine-3'-phosphate
tattgctttagccacatatgcag

SEQ ID NO: 2788 - RNA, 21 nt, synthetic construct
  source 1..21: mol_type = other RNA; note = Description of Artificial Sequence: Synthetic oligonucleotide
  modified_base 1: mod_base = OTHER; note = 2'-O-methylcytidine-3'-phosphorothioate
  modified_base 2: mod_base = OTHER; note = 2'-O-methyladenosine-3'-phosphorothioate
  modified_base 3: mod_base = OTHER; note = 2'-O-methyluridine-3'-phosphate
  modified_base 4: mod_base = OTHER; note = 2'-O-methyladenosine-3'-phosphate
  modified_base 5: mod_base = OTHER; note = 2'-O-methyluridine-3'-phosphate
  modified_base 6: mod_base = OTHER; note = 2'-O-methylguanosine-3'-phosphate
  modified_base 7: mod_base = OTHER; note = 2'-fluorouridine-3'-phosphate
  modified_base 8: mod_base = OTHER; note = 2'-O-methylguanosine-3'-phosphate
  modified_base 9: mod_base = OTHER; note = 2'-fluoroguanosine-3'-phosphate
  modified_base 10: mod_base = OTHER; note = 2'-fluorocytidine-3'-phosphate
  modified_base 11: mod_base = OTHER; note = 2'-fluorouridine-3'-phosphate
  modified_base 12: mod_base = OTHER; note = 2'-O-methyladenosine-3'-phosphate
  modified_base 13: mod_base = OTHER; note = 2'-O-methyladenosine-3'-phosphate
  modified_base 14: mod_base = OTHER; note = 2'-O-methyladenosine-3'-phosphate
  modified_base 15: mod_base = OTHER; note = 2'-O-methylguanosine-3'-phosphate
  modified_base 16: mod_base = OTHER; note = 2'-O-methylcytidine-3'-phosphate
  modified_base 17: mod_base = OTHER; note = 2'-O-methyladenosine-3'-phosphate
  modified_base 18: mod_base = OTHER; note = 2'-O-methyladenosine-3'-phosphate
  modified_base 19: mod_base = OTHER; note = 2'-O-methyluridine-3'-phosphate
  modified_base 20: mod_base = OTHER; note = 2'-O-methyladenosine-3'-phosphate
  modified_base 21: mod_base = OTHER; note = 2'-O-methylguanosine-3'-phosphate N-[tris(GalNAc-alkyl)-amidodecanoyl)]-4-hydroxyprolinol Hyp-(GalNAc-alkyl)3
catatgtggctaaagcaatag

SEQ ID NO: 2789 - RNA, 23 nt, synthetic construct
  source 1..23: mol_type = other RNA; note = Description of Artificial Sequence: Synthetic oligonucleotide
  modified_base 1: mod_base = OTHER; note = 2'-O-methylcytidine-3'-phosphorothioate
  modified_base 2: mod_base = OTHER; note = 2'-fluorouridine -3'-phosphorothioate
  modified_base 3: mod_base = OTHER; note = 2'-O-methyladenosine-3'-phosphate
  modified_base 4: mod_base = OTHER; note = 2'-O-methyluridine-3'-phosphate
  modified_base 5: mod_base = OTHER; note = 2'-O-methyluridine-3'-phosphate
  modified_base 6: mod_base = OTHER; note = 2'-fluoroguanosine-3'-phosphate
  modified_base 7: mod_base = OTHER; note = 2'-O-methylcytidine-3'-phosphate
  modified_base 8: mod_base = OTHER; note = 2'-fluorouridine-3'-phosphate
  modified_base 9: mod_base = OTHER; note = 2'-fluorouridine-3'-phosphate
  modified_base 10: mod_base = OTHER; note = 2'-O-methyluridine-3'-phosphate
  modified_base 11: mod_base = OTHER; note = 2'-O-methyladenosine-3'-phosphate
  modified_base 12: mod_base = OTHER; note = 2'-O-methylguanosine-3'-phosphate
  modified_base 13: mod_base = OTHER; note = 2'-O-methylcytidine-3'-phosphate
  modified_base 14: mod_base = OTHER; note = 2'-fluorocytidine-3'-phosphate
  modified_base 15: mod_base = OTHER; note = 2'-O-methyladenosine-3'-phosphate
  modified_base 16: mod_base = OTHER; note = 2'-fluorocytidine-3'-phosphate
  modified_base 17: mod_base = OTHER; note = 2'-O-methyladenosine-3'-phosphate
  modified_base 18: mod_base = OTHER; note = 2'-O-methyluridine-3'-phosphate
  modified_base 19: mod_base = OTHER; note = 2'-O-methyladenosine-3'-phosphate
  modified_base 20: mod_base = OTHER; note = 2'-O-methyluridine-3'-phosphate
  modified_base 21: mod_base = OTHER; note = 2'-O-methylguanosine-3'-phosphorothioate
  modified_base 22: mod_base = OTHER; note = 2'-O-methylcytidine-3'-phosphorothioate
  modified_base 23: mod_base = OTHER; note = 2'-O-methyladenosine-3'-phosphate
ctattgctttagccacatatgca

SEQ ID NO: 2790 - RNA, 21 nt, synthetic construct
  source 1..21: mol_type = other RNA; note = Description of Artificial Sequence: Synthetic oligonucleotide
  modified_base 1: mod_base = OTHER; note = 2'-O-methyluridine-3'-phosphorothioate
  modified_base 2: mod_base = OTHER; note = 2'-O-methylguanosine-3'-phosphorothioate
  modified_base 3: mod_base = OTHER; note = 2'-O-methylcytidine-3'-phosphate
  modified_base 4: mod_base = OTHER; note = 2'-O-methyluridine-3'-phosphate
  modified_base 5: mod_base = OTHER; note = 2'-O-methylguanosine-3'-phosphate
  modified_base 6: mod_base = OTHER; note = 2'-O-methylcytidine-3'-phosphate
  modified_base 7: mod_base = OTHER; note = 2'-fluoroadenosine-3'-phosphate
  modified_base 8: mod_base = OTHER; note = 2'-O-methyluridine-3'-phosphate
  modified_base 9: mod_base = OTHER; note = 2'-fluoroadenosine-3'-phosphate
  modified_base 10: mod_base = OTHER; note = 2'-fluorouridine-3'-phosphate
  modified_base 11: mod_base = OTHER; note = 2'-fluoroguanosine-3'-phosphate
  modified_base 12: mod_base = OTHER; note = 2'-O-methyluridine-3'-phosphate
  modified_base 13: mod_base = OTHER; note = 2'-O-methylguanosine-3'-phosphate
  modified_base 14: mod_base = OTHER; note = 2'-O-methylguanosine-3'-phosphate
  modified_base 15: mod_base = OTHER; note = 2'-O-methylcytidine-3'-phosphate
  modified_base 16: mod_base = OTHER; note = 2'-O-methyluridine-3'-phosphate
  modified_base 17: mod_base = OTHER; note = 2'-O-methyladenosine-3'-phosphate
  modified_base 18: mod_base = OTHER; note = 2'-O-methyladenosine-3'-phosphate
  modified_base 19: mod_base = OTHER; note = 2'-O-methyladenosine-3'-phosphate
  modified_base 20: mod_base = OTHER; note = 2'-O-methylguanosine-3'-phosphate
  modified_base 21: mod_base = OTHER; note = 2'-O-methylcytidine-3'-phosphate N-[tris(GalNAc-alkyl)-amidodecanoyl)]-4-hydroxyprolinol Hyp-(GalNAc-alkyl)3
tgctgcatatgtggctaaagc

SEQ ID NO: 2791 - RNA, 23 nt, synthetic construct
  source 1..23: mol_type = other RNA; note = Description of Artificial Sequence: Synthetic oligonucleotide
  modified_base 1: mod_base = OTHER; note = 2'-O-methylguanosine-3'-phosphorothioate
  modified_base 2: mod_base = OTHER; note = 2'-fluorocytidine-3'-phosphorothioate
  modified_base 3: mod_base = OTHER; note = 2'-O-methyluridine-3'-phosphate
  modified_base 4: mod_base = OTHER; note = 2'-O-methyluridine-3'-phosphate
  modified_base 5: mod_base = OTHER; note = 2'-O-methyluridine-3'-phosphate
  modified_base 6: mod_base = OTHER; note = 2'-fluoroadenosine-3'-phosphate
  modified_base 7: mod_base = OTHER; note = 2'-O-methylguanosine-3'-phosphate
  modified_base 8: mod_base = OTHER; note = 2'-fluorocytidine-3'-phosphate
  modified_base 9: mod_base = OTHER; note = 2'-fluorocytidine-3'-phosphate
  modified_base 10: mod_base = OTHER; note = 2'-O-methyladenosine-3'-phosphate
  modified_base 11: mod_base = OTHER; note = 2'-O-methylcytidine-3'-phosphate
  modified_base 12: mod_base = OTHER; note = 2'-O-methyladenosine-3'-phosphate
  modified_base 13: mod_base = OTHER; note = 2'-O-methyluridine-3'-phosphate
  modified_base 14: mod_base = OTHER; note = 2'-fluoroadenosine-3'-phosphate
  modified_base 15: mod_base = OTHER; note = 2'-O-methyluridine-3'-phosphate
  modified_base 16: mod_base = OTHER; note = 2'-fluoroguanosine-3'-phosphate
  modified_base 17: mod_base = OTHER; note = 2'-O-methylcytidine-3'-phosphate
  modified_base 18: mod_base = OTHER; note = 2'-O-methyladenosine-3'-phosphate
  modified_base 19: mod_base = OTHER; note = 2'-O-methylguanosine-3'-phosphate
  modified_base 20: mod_base = OTHER; note = 2'-O-methylcytidine-3'-phosphate
  modified_base 21: mod_base = OTHER; note = 2'-O-methyladenosine-3'-phosphorothioate
  modified_base 22: mod_base = OTHER; note = 2'-O-methyladenosine-3'-phosphorothioate
  modified_base 23: mod_base = OTHER; note = 2'-O-methylguanosine-3'-phosphate
gctttagccacatatgcagcaag

SEQ ID NO: 2792 - RNA, 21 nt, synthetic construct
  source 1..21: mol_type = other RNA; note = Description of Artificial Sequence: Synthetic oligonucleotide
  modified_base 1: mod_base = OTHER; note = 2'-O-methyluridine-3'-phosphorothioate
  modified_base 2: mod_base = OTHER; note = 2'-O-methyluridine-3'-phosphorothioate
  modified_base 3: mod_base = OTHER; note = 2'-O-methylguanosine-3'-phosphate
  modified_base 4: mod_base = OTHER; note = 2'-O-methylcytidine-3'-phosphate
  modified_base 5: mod_base = OTHER; note = 2'-O-methyluridine-3'-phosphate
  modified_base 6: mod_base = OTHER; note = 2'-O-methylguanosine-3'-phosphate
  modified_base 7: mod_base = OTHER; note = 2'-fluorocytidine-3'-phosphate
  modified_base 8: mod_base = OTHER; note = 2'-O-methyladenosine-3'-phosphate
  modified_base 9: mod_base = OTHER; note = 2'-fluorouridine-3'-phosphate
  modified_base 10: mod_base = OTHER; note = 2'-fluoroadenosine-3'-phosphate
  modified_base 11: mod_base = OTHER; note = 2'-fluorouridine-3'-phosphate
  modified_base 12: mod_base = OTHER; note = 2'-O-methylguanosine-3'-phosphate
  modified_base 13: mod_base = OTHER; note = 2'-O-methyluridine-3'-phosphate
  modified_base 14: mod_base = OTHER; note = 2'-O-methylguanosine-3'-phosphate
  modified_base 15: mod_base = OTHER; note = 2'-O-methylguanosine-3'-phosphate
  modified_base 16: mod_base = OTHER; note = 2'-O-methylcytidine-3'-phosphate
  modified_base 17: mod_base = OTHER; note = 2'-O-methyluridine-3'-phosphate
  modified_base 18: mod_base = OTHER; note = 2'-O-methyladenosine-3'-phosphate
  modified_base 19: mod_base = OTHER; note = 2'-O-methyladenosine-3'-phosphate
  modified_base 20: mod_base = OTHER; note = 2'-O-methyladenosine-3'-phosphate
  modified_base 21: mod_base = OTHER; note = 2'-O-methylguanosine-3'-phosphate N-[tris(GalNAc-alkyl)-amidodecanoyl)]-4-hydroxyprolinol Hyp-(GalNAc-alkyl)3
ttgctgcatatgtggctaaag

SEQ ID NO: 2793 - RNA, 23 nt, synthetic construct
  source 1..23: mol_type = other RNA; note = Description of Artificial Sequence: Synthetic oligonucleotide
  modified_base 1: mod_base = OTHER; note = 2'-O-methylcytidine-3'-phosphorothioate
  modified_base 2: mod_base = OTHER; note = 2'-fluorouridine -3'-phosphorothioate
  modified_base 3: mod_base = OTHER; note = 2'-O-methyluridine-3'-phosphate
  modified_base 4: mod_base = OTHER; note = 2'-O-methyluridine-3'-phosphate
  modified_base 5: mod_base = OTHER; note = 2'-O-methyladenosine-3'-phosphate
  modified_base 6: mod_base = OTHER; note = 2'-fluoroguanosine-3'-phosphate
  modified_base 7: mod_base = OTHER; note = 2'-O-methylcytidine-3'-phosphate
  modified_base 8: mod_base = OTHER; note = 2'-fluorocytidine-3'-phosphate
  modified_base 9: mod_base = OTHER; note = 2'-fluoroadenosine-3'-phosphate
  modified_base 10: mod_base = OTHER; note = 2'-O-methylcytidine-3'-phosphate
  modified_base 11: mod_base = OTHER; note = 2'-O-methyladenosine-3'-phosphate
  modified_base 12: mod_base = OTHER; note = 2'-O-methyluridine-3'-phosphate
  modified_base 13: mod_base = OTHER; note = 2'-O-methyladenosine-3'-phosphate
  modified_base 14: mod_base = OTHER; note = 2'-fluorouridine-3'-phosphate
  modified_base 15: mod_base = OTHER; note = 2'-O-methylguanosine-3'-phosphate
  modified_base 16: mod_base = OTHER; note = 2'-fluorocytidine-3'-phosphate
  modified_base 17: mod_base = OTHER; note = 2'-O-methyladenosine-3'-phosphate
  modified_base 18: mod_base = OTHER; note = 2'-O-methylguanosine-3'-phosphate
  modified_base 19: mod_base = OTHER; note = 2'-O-methylcytidine-3'-phosphate
  modified_base 20: mod_base = OTHER; note = 2'-O-methyladenosine-3'-phosphate
  modified_base 21: mod_base = OTHER; note = 2'-O-methyladenosine-3'-phosphorothioate
  modified_base 22: mod_base = OTHER; note = 2'-O-methylguanosine-3'-phosphorothioate
  modified_base 23: mod_base = OTHER; note = 2'-O-methyluridine-3'-phosphate
ctttagccacatatgcagcaagt

SEQ ID NO: 2794 - RNA, 21 nt, synthetic construct
  source 1..21: mol_type = other RNA; note = Description of Artificial Sequence: Synthetic oligonucleotide
  modified_base 1: mod_base = OTHER; note = 2'-O-methyladenosine-3'-phosphorothioate
  modified_base 2: mod_base = OTHER; note = 2'-O-methyladenosine-3'-phosphorothioate
  modified_base 3: mod_base = OTHER; note = 2'-O-methyladenosine-3'-phosphate
  modified_base 4: mod_base = OTHER; note = 2'-O-methyluridine-3'-phosphate
  modified_base 5: mod_base = OTHER; note = 2'-O-methylguanosine-3'-phosphate
  modified_base 6: mod_base = OTHER; note = 2'-O-methyladenosine-3'-phosphate
  modified_base 7: mod_base = OTHER; note = 2'-fluorouridine-3'-phosphate
  modified_base 8: mod_base = OTHER; note = 2'-O-methylguanosine-3'-phosphate
  modified_base 9: mod_base = OTHER; note = 2'-fluoroadenosine-3'-phosphate
  modified_base 10: mod_base = OTHER; note = 2'-fluoroadenosine-3'-phosphate
  modified_base 11: mod_base = OTHER; note = 2'-fluoroguanosine-3'-phosphate
  modified_base 12: mod_base = OTHER; note = 2'-O-methyladenosine-3'-phosphate
  modified_base 13: mod_base = OTHER; note = 2'-O-methyladenosine-3'-phosphate
  modified_base 14: mod_base = OTHER; note = 2'-O-methyladenosine-3'-phosphate
  modified_base 15: mod_base = OTHER; note = 2'-O-methylcytidine-3'-phosphate
  modified_base 16: mod_base = OTHER; note = 2'-O-methyluridine-3'-phosphate
  modified_base 17: mod_base = OTHER; note = 2'-O-methyluridine-3'-phosphate
  modified_base 18: mod_base = OTHER; note = 2'-O-methyluridine-3'-phosphate
  modified_base 19: mod_base = OTHER; note = 2'-O-methylguanosine-3'-phosphate
  modified_base 20: mod_base = OTHER; note = 2'-O-methylguanosine-3'-phosphate
  modified_base 21: mod_base = OTHER; note = 2'-O-methylcytidine-3'-phosphate N-[tris(GalNAc-alkyl)-amidodecanoyl)]-4-hydroxyprolinol Hyp-(GalNAc-alkyl)3
aaatgatgaagaaactttggc

SEQ ID NO: 2795 - RNA, 23 nt, synthetic construct
  source 1..23: mol_type = other RNA; note = Description of Artificial Sequence: Synthetic oligonucleotide
  modified_base 1: mod_base = OTHER; note = 2'-O-methylguanosine-3'-phosphorothioate
  modified_base 2: mod_base = OTHER; note = 2'-fluorocytidine-3'-phosphorothioate
  modified_base 3: mod_base = OTHER; note = 2'-O-methylcytidine-3'-phosphate
  modified_base 4: mod_base = OTHER; note = 2'-O-methyladenosine-3'-phosphate
  modified_base 5: mod_base = OTHER; note = 2'-O-methyladenosine-3'-phosphate
  modified_base 6: mod_base = OTHER; note = 2'-fluoroadenosine-3'-phosphate
  modified_base 7: mod_base = OTHER; note = 2'-O-methylguanosine-3'-phosphate
  modified_base 8: mod_base = OTHER; note = 2'-fluorouridine-3'-phosphate
  modified_base 9: mod_base = OTHER; note = 2'-fluorouridine-3'-phosphate
  modified_base 10: mod_base = OTHER; note = 2'-O-methyluridine-3'-phosphate
  modified_base 11: mod_base = OTHER; note = 2'-O-methylcytidine-3'-phosphate
  modified_base 12: mod_base = OTHER; note = 2'-O-methyluridine-3'-phosphate
  modified_base 13: mod_base = OTHER; note = 2'-O-methyluridine-3'-phosphate
  modified_base 14: mod_base = OTHER; note = 2'-fluorocytidine-3'-phosphate
  modified_base 15: mod_base = OTHER; note = 2'-O-methyladenosine-3'-phosphate
  modified_base 16: mod_base = OTHER; note = 2'-fluorouridine-3'-phosphate
  modified_base 17: mod_base = OTHER; note = 2'-O-methylcytidine-3'-phosphate
  modified_base 18: mod_base = OTHER; note = 2'-O-methyladenosine-3'-phosphate
  modified_base 19: mod_base = OTHER; note = 2'-O-methyluridine-3'-phosphate
  modified_base 20: mod_base = OTHER; note = 2'-O-methyluridine-3'-phosphate
  modified_base 21: mod_base = OTHER; note = 2'-O-methyluridine-3'-phosphorothioate
  modified_base 22: mod_base = OTHER; note = 2'-O-methylguanosine-3'-phosphorothioate
  modified_base 23: mod_base = OTHER; note = 2'-O-methylcytidine-3'-phosphate
gccaaagtttcttcatcatttgc

SEQ ID NO: 2796 - RNA, 21 nt, synthetic construct
  source 1..21: mol_type = other RNA; note = Description of Artificial Sequence: Synthetic oligonucleotide
  modified_base 1: mod_base = OTHER; note = 2'-O-methyladenosine-3'-phosphorothioate
  modified_base 2: mod_base = OTHER; note = 2'-O-methyladenosine-3'-phosphorothioate
  modified_base 3: mod_base = OTHER; note = 2'-O-methyluridine-3'-phosphate
  modified_base 4: mod_base = OTHER; note = 2'-O-methylguanosine-3'-phosphate
  modified_base 5: mod_base = OTHER; note = 2'-O-methyladenosine-3'-phosphate
  modified_base 6: mod_base = OTHER; note = 2'-O-methyluridine-3'-phosphate
  modified_base 7: mod_base = OTHER; note = 2'-fluoroguanosine-3'-phosphate
  modified_base 8: mod_base = OTHER; note = 2'-O-methyladenosine-3'-phosphate
  modified_base 9: mod_base = OTHER; note = 2'-fluoroadenosine-3'-phosphate
  modified_base 10: mod_base = OTHER; note = 2'-fluoroguanosine-3'-phosphate
  modified_base 11: mod_base = OTHER; note = 2'-fluoroadenosine-3'-phosphate
  modified_base 12: mod_base = OTHER; note = 2'-O-methyladenosine-3'-phosphate
  modified_base 13: mod_base = OTHER; note = 2'-O-methyladenosine-3'-phosphate
  modified_base 14: mod_base = OTHER; note = 2'-O-methylcytidine-3'-phosphate
  modified_base 15: mod_base = OTHER; note = 2'-O-methyluridine-3'-phosphate
  modified_base 16: mod_base = OTHER; note = 2'-O-methyluridine-3'-phosphate
  modified_base 17: mod_base = OTHER; note = 2'-O-methyluridine-3'-phosphate
  modified_base 18: mod_base = OTHER; note = 2'-O-methylguanosine-3'-phosphate
  modified_base 19: mod_base = OTHER; note = 2'-O-methylguanosine-3'-phosphate
  modified_base 20: mod_base = OTHER; note = 2'-O-methylcytidine-3'-phosphate
  modified_base 21: mod_base = OTHER; note = 2'-O-methyluridine-3'-phosphate N-[tris(GalNAc-alkyl)-amidodecanoyl)]-4-hydroxyprolinol Hyp-(GalNAc-alkyl)3
aatgatgaagaaactttggct

SEQ ID NO: 2797 - RNA, 23 nt, synthetic construct
  source 1..23: mol_type = other RNA; note = Description of Artificial Sequence: Synthetic oligonucleotide
  modified_base 1: mod_base = OTHER; note = 2'-O-methyladenosine-3'-phosphorothioate
  modified_base 2: mod_base = OTHER; note = 2'-fluoroguanosine-3'-phosphorothioate
  modified_base 3: mod_base = OTHER; note = 2'-O-methylcytidine-3'-phosphate
  modified_base 4: mod_base = OTHER; note = 2'-O-methylcytidine-3'-phosphate
  modified_base 5: mod_base = OTHER; note = 2'-O-methyladenosine-3'-phosphate
  modified_base 6: mod_base = OTHER; note = 2'-fluoroadenosine-3'-phosphate
  modified_base 7: mod_base = OTHER; note = 2'-O-methyladenosine-3'-phosphate
  modified_base 8: mod_base = OTHER; note = 2'-fluoroguanosine-3'-phosphate
  modified_base 9: mod_base = OTHER; note = 2'-fluorouridine-3'-phosphate
  modified_base 10: mod_base = OTHER; note = 2'-O-methyluridine-3'-phosphate
  modified_base 11: mod_base = OTHER; note = 2'-O-methyluridine-3'-phosphate
  modified_base 12: mod_base = OTHER; note = 2'-O-methylcytidine-3'-phosphate
  modified_base 13: mod_base = OTHER; note = 2'-O-methyluridine-3'-phosphate
  modified_base 14: mod_base = OTHER; note = 2'-fluorouridine-3'-phosphate
  modified_base 15: mod_base = OTHER; note = 2'-O-methylcytidine-3'-phosphate
  modified_base 16: mod_base = OTHER; note = 2'-fluoroadenosine-3'-phosphate
  modified_base 17: mod_base = OTHER; note = 2'-O-methyluridine-3'-phosphate
  modified_base 18: mod_base = OTHER; note = 2'-O-methylcytidine-3'-phosphate
  modified_base 19: mod_base = OTHER; note = 2'-O-methyladenosine-3'-phosphate
  modified_base 20: mod_base = OTHER; note = 2'-O-methyluridine-3'-phosphate
  modified_base 21: mod_base = OTHER; note = 2'-O-methyluridine-3'-phosphorothioate
  modified_base 22: mod_base = OTHER; note = 2'-O-methyluridine-3'-phosphorothioate
  modified_base 23: mod_base = OTHER; note = 2'-O-methylguanosine-3'-phosphate
agccaaagtttcttcatcatttg

SEQ ID NO: 2798 - RNA, 21 nt, synthetic construct
  source 1..21: mol_type = other RNA; note = Description of Artificial Sequence: Synthetic oligonucleotide
  modified_base 1: mod_base = OTHER; note = 2'-O-methylguanosine-3'-phosphorothioate
  modified_base 2: mod_base = OTHER; note = 2'-O-methylguanosine-3'-phosphorothioate
  modified_base 3: mod_base = OTHER; note = 2'-O-methylguanosine-3'-phosphate
  modified_base 4: mod_base = OTHER; note = 2'-O-methylcytidine-3'-phosphate
  modified_base 5: mod_base = OTHER; note = 2'-O-methyladenosine-3'-phosphate
  modified_base 6: mod_base = OTHER; note = 2'-O-methyladenosine-3'-phosphate
  modified_base 7: mod_base = OTHER; note = 2'-fluoroadenosine-3'-phosphate
  modified_base 8: mod_base = OTHER; note = 2'-O-methyluridine-3'-phosphate
  modified_base 9: mod_base = OTHER; note = 2'-fluoroguanosine-3'-phosphate
  modified_base 10: mod_base = OTHER; note = 2'-fluoroadenosine-3'-phosphate
  modified_base 11: mod_base = OTHER; note = 2'-fluorouridine-3'-phosphate
  modified_base 12: mod_base = OTHER; note = 2'-O-methylguanosine-3'-phosphate
  modified_base 13: mod_base = OTHER; note = 2'-O-methyladenosine-3'-phosphate
  modified_base 14: mod_base = OTHER; note = 2'-O-methyladenosine-3'-phosphate
  modified_base 15: mod_base = OTHER; note = 2'-O-methylguanosine-3'-phosphate
  modified_base 16: mod_base = OTHER; note = 2'-O-methyladenosine-3'-phosphate
  modified_base 17: mod_base = OTHER; note = 2'-O-methyladenosine-3'-phosphate
  modified_base 18: mod_base = OTHER; note = 2'-O-methyladenosine-3'-phosphate
  modified_base 19: mod_base = OTHER; note = 2'-O-methylcytidine-3'-phosphate
  modified_base 20: mod_base = OTHER; note = 2'-O-methyluridine-3'-phosphate
  modified_base 21: mod_base = OTHER; note = 2'-O-methyluridine-3'-phosphate N-[tris(GalNAc-alkyl)-amidodecanoyl)]-4-hydroxyprolinol Hyp-(GalNAc-alkyl)3
gggcaaatgatgaagaaactt

SEQ ID NO: 2799 - RNA, 23 nt, synthetic construct
  source 1..23: mol_type = other RNA; note = Description of Artificial Sequence: Synthetic oligonucleotide
  modified_base 1: mod_base = OTHER; note = 2'-O-methyladenosine-3'-phosphorothioate
  modified_base 2: mod_base = OTHER; note = 2'-fluoroadenosine-3'-phosphorothioate
  modified_base 3: mod_base = OTHER; note = 2'-O-methylguanosine-3'-phosphate
  modified_base 4: mod_base = OTHER; note = 2'-O-methyluridine-3'-phosphate
  modified_base 5: mod_base = OTHER; note = 2'-O-methyluridine-3'-phosphate
  modified_base 6: mod_base = OTHER; note = 2'-fluorouridine-3'-phosphate
  modified_base 7: mod_base = OTHER; note = 2'-O-methylcytidine-3'-phosphate
  modified_base 8: mod_base = OTHER; note = 2'-fluorouridine-3'-phosphate
  modified_base 9: mod_base = OTHER; note = 2'-fluorouridine-3'-phosphate
  modified_base 10: mod_base = OTHER; note = 2'-O-methylcytidine-3'-phosphate
  modified_base 11: mod_base = OTHER; note = 2'-O-methyladenosine-3'-phosphate
  modified_base 12: mod_base = OTHER; note = 2'-O-methyluridine-3'-phosphate
  modified_base 13: mod_base = OTHER; note = 2'-O-methylcytidine-3'-phosphate
  modified_base 14: mod_base = OTHER; note = 2'-fluoroadenosine-3'-phosphate
  modified_base 15: mod_base = OTHER; note = 2'-O-methyluridine-3'-phosphate
  modified_base 16: mod_base = OTHER; note = 2'-fluorouridine-3'-phosphate
  modified_base 17: mod_base = OTHER; note = 2'-O-methyluridine-3'-phosphate
  modified_base 18: mod_base = OTHER; note = 2'-O-methylguanosine-3'-phosphate
  modified_base 19: mod_base = OTHER; note = 2'-O-methylcytidine-3'-phosphate
  modified_base 20: mod_base = OTHER; note = 2'-O-methylcytidine-3'-phosphate
  modified_base 21: mod_base = OTHER; note = 2'-O-methylcytidine-3'-phosphorothioate
  modified_base 22: mod_base = OTHER; note = 2'-O-methylcytidine-3'-phosphorothioate
  modified_base 23: mod_base = OTHER; note = 2'-O-methyladenosine-3'-phosphate
aagtttcttcatcatttgcccca

SEQ ID NO: 2800 - RNA, 21 nt, synthetic construct
  source 1..21: mol_type = other RNA; note = Description of Artificial Sequence: Synthetic oligonucleotide
  modified_base 1: mod_base = OTHER; note = 2'-O-methylguanosine-3'-phosphorothioate
  modified_base 2: mod_base = OTHER; note = 2'-O-methylguanosine-3'-phosphorothioate
  modified_base 3: mod_base = OTHER; note = 2'-O-methylguanosine-3'-phosphate
  modified_base 4: mod_base = OTHER; note = 2'-O-methylguanosine-3'-phosphate
  modified_base 5: mod_base = OTHER; note = 2'-O-methylcytidine-3'-phosphate
  modified_base 6: mod_base = OTHER; note = 2'-O-methyladenosine-3'-phosphate
  modified_base 7: mod_base = OTHER; note = 2'-fluoroadenosine-3'-phosphate
  modified_base 8: mod_base = OTHER; note = 2'-O-methyladenosine-3'-phosphate
  modified_base 9: mod_base = OTHER; note = 2'-fluorouridine-3'-phosphate
  modified_base 10: mod_base = OTHER; note = 2'-fluoroguanosine-3'-phosphate
  modified_base 11: mod_base = OTHER; note = 2'-fluoroadenosine-3'-phosphate
  modified_base 12: mod_base = OTHER; note = 2'-O-methyluridine-3'-phosphate
  modified_base 13: mod_base = OTHER; note = 2'-O-methylguanosine-3'-phosphate
  modified_base 14: mod_base = OTHER; note = 2'-O-methyladenosine-3'-phosphate
  modified_base 15: mod_base = OTHER; note = 2'-O-methyladenosine-3'-phosphate
  modified_base 16: mod_base = OTHER; note = 2'-O-methylguanosine-3'-phosphate
  modified_base 17: mod_base = OTHER; note = 2'-O-methyladenosine-3'-phosphate
  modified_base 18: mod_base = OTHER; note = 2'-O-methyladenosine-3'-phosphate
  modified_base 19: mod_base = OTHER; note = 2'-O-methyladenosine-3'-phosphate
  modified_base 20: mod_base = OTHER; note = 2'-O-methylcytidine-3'-phosphate
  modified_base 21: mod_base = OTHER; note = 2'-O-methyluridine-3'-phosphate N-[tris(GalNAc-alkyl)-amidodecanoyl)]-4-hydroxyprolinol Hyp-(GalNAc-alkyl)3
ggggcaaatgatgaagaaact

SEQ ID NO: 2801 - RNA, 23 nt, synthetic construct
  source 1..23: mol_type = other RNA; note = Description of Artificial Sequence: Synthetic oligonucleotide
  modified_base 1: mod_base = OTHER; note = 2'-O-methyladenosine-3'-phosphorothioate
  modified_base 2: mod_base = OTHER; note = 2'-fluoroguanosine-3'-phosphorothioate
  modified_base 3: mod_base = OTHER; note = 2'-O-methyluridine-3'-phosphate
  modified_base 4: mod_base = OTHER; note = 2'-O-methyluridine-3'-phosphate
  modified_base 5: mod_base = OTHER; note = 2'-O-methyluridine-3'-phosphate
  modified_base 6: mod_base = OTHER; note = 2'-fluorocytidine-3'-phosphate
  modified_base 7: mod_base = OTHER; note = 2'-O-methyluridine-3'-phosphate
  modified_base 8: mod_base = OTHER; note = 2'-fluorouridine-3'-phosphate
  modified_base 9: mod_base = OTHER; note = 2'-fluorocytidine-3'-phosphate
  modified_base 10: mod_base = OTHER; note = 2'-O-methyladenosine-3'-phosphate
  modified_base 11: mod_base = OTHER; note = 2'-O-methyluridine-3'-phosphate
  modified_base 12: mod_base = OTHER; note = 2'-O-methylcytidine-3'-phosphate
  modified_base 13: mod_base = OTHER; note = 2'-O-methyladenosine-3'-phosphate
  modified_base 14: mod_base = OTHER; note = 2'-fluorouridine-3'-phosphate
  modified_base 15: mod_base = OTHER; note = 2'-O-methyluridine-3'-phosphate
  modified_base 16: mod_base = OTHER; note = 2'-fluorouridine-3'-phosphate
  modified_base 17: mod_base = OTHER; note = 2'-O-methylguanosine-3'-phosphate
  modified_base 18: mod_base = OTHER; note = 2'-O-methylcytidine-3'-phosphate
  modified_base 19: mod_base = OTHER; note = 2'-O-methylcytidine-3'-phosphate
  modified_base 20: mod_base = OTHER; note = 2'-O-methylcytidine-3'-phosphate
  modified_base 21: mod_base = OTHER; note = 2'-O-methylcytidine-3'-phosphorothioate
  modified_base 22: mod_base = OTHER; note = 2'-O-methyladenosine-3'-phosphorothioate
  modified_base 23: mod_base = OTHER; note = 2'-O-methylguanosine-3'-phosphate
agtttcttcatcatttgccccag

SEQ ID NO: 2802 - RNA, 21 nt, synthetic construct
  source 1..21: mol_type = other RNA; note = Description of Artificial Sequence: Synthetic oligonucleotide
  modified_base 1: mod_base = OTHER; note = 2'-O-methylguanosine-3'-phosphorothioate
  modified_base 2: mod_base = OTHER; note = 2'-O-methyladenosine-3'-phosphorothioate
  modified_base 3: mod_base = OTHER; note = 2'-O-methylguanosine-3'-phosphate
  modified_base 4: mod_base = OTHER; note = 2'-O-methyladenosine-3'-phosphate
  modified_base 5: mod_base = OTHER; note = 2'-O-methyluridine-3'-phosphate
  modified_base 6: mod_base = OTHER; note = 2'-O-methyladenosine-3'-phosphate
  modified_base 7: mod_base = OTHER; note = 2'-fluorocytidine-3'-phosphate
  modified_base 8: mod_base = OTHER; note = 2'-O-methyluridine-3'-phosphate
  modified_base 9: mod_base = OTHER; note = 2'-fluoroadenosine-3'-phosphate
  modified_base 10: mod_base = OTHER; note = 2'-fluoroadenosine-3'-phosphate
  modified_base 11: mod_base = OTHER; note = 2'-fluoroadenosine-3'-phosphate
  modified_base 12: mod_base = OTHER; note = 2'-O-methylguanosine-3'-phosphate
  modified_base 13: mod_base = OTHER; note = 2'-O-methylguanosine-3'-phosphate
  modified_base 14: mod_base = OTHER; note = 2'-O-methyladenosine-3'-phosphate
  modified_base 15: mod_base = OTHER; note = 2'-O-methyladenosine-3'-phosphate
  modified_base 16: mod_base = OTHER; note = 2'-O-methylguanosine-3'-phosphate
  modified_base 17: mod_base = OTHER; note = 2'-O-methyladenosine-3'-phosphate
  modified_base 18: mod_base = OTHER; note = 2'-O-methyladenosine-3'-phosphate
  modified_base 19: mod_base = OTHER; note = 2'-O-methyluridine-3'-phosphate
  modified_base 20: mod_base = OTHER; note = 2'-O-methyluridine-3'-phosphate
  modified_base 21: mod_base = OTHER; note = 2'-O-methylcytidine-3'-phosphate N-[tris(GalNAc-alkyl)-amidodecanoyl)]-4-hydroxyprolinol Hyp-(GalNAc-alkyl)3
gagatactaaaggaagaattc

SEQ ID NO: 2803 - RNA, 23 nt, synthetic construct
  source 1..23: mol_type = other RNA; note = Description of Artificial Sequence: Synthetic oligonucleotide
  modified_base 1: mod_base = OTHER; note = 2'-O-methylguanosine-3'-phosphorothioate
  modified_base 2: mod_base = OTHER; note = 2'-fluoroadenosine-3'-phosphorothioate
  modified_base 3: mod_base = OTHER; note = 2'-O-methyladenosine-3'-phosphate
  modified_base 4: mod_base = OTHER; note = 2'-O-methyluridine-3'-phosphate
  modified_base 5: mod_base = OTHER; note = 2'-O-methyluridine-3'-phosphate
  modified_base 6: mod_base = OTHER; note = 2'-fluorocytidine-3'-phosphate
  modified_base 7: mod_base = OTHER; note = 2'-O-methyluridine-3'-phosphate
  modified_base 8: mod_base = OTHER; note = 2'-fluorouridine-3'-phosphate
  modified_base 9: mod_base = OTHER; note = 2'-fluorocytidine-3'-phosphate
  modified_base 10: mod_base = OTHER; note = 2'-O-methylcytidine-3'-phosphate
  modified_base 11: mod_base = OTHER; note = 2'-O-methyluridine-3'-phosphate
  modified_base 12: mod_base = OTHER; note = 2'-O-methyluridine-3'-phosphate
  modified_base 13: mod_base = OTHER; note = 2'-O-methyluridine-3'-phosphate
  modified_base 14: mod_base = OTHER; note = 2'-fluoroadenosine-3'-phosphate
  modified_base 15: mod_base = OTHER; note = 2'-O-methylguanosine-3'-phosphate
  modified_base 16: mod_base = OTHER; note = 2'-fluorouridine-3'-phosphate
  modified_base 17: mod_base = OTHER; note = 2'-O-methyladenosine-3'-phosphate
  modified_base 18: mod_base = OTHER; note = 2'-O-methyluridine-3'-phosphate
  modified_base 19: mod_base = OTHER; note = 2'-O-methylcytidine-3'-phosphate
  modified_base 20: mod_base = OTHER; note = 2'-O-methyluridine-3'-phosphate
  modified_base 21: mod_base = OTHER; note = 2'-O-methylcytidine-3'-phosphorothioate
  modified_base 22: mod_base = OTHER; note = 2'-O-methylguanosine-3'-phosphorothioate
  modified_base 23: mod_base = OTHER; note = 2'-O-methyladenosine-3'-phosphate
gaattcttcctttagtatctcga

SEQ ID NO: 2804 - RNA, 21 nt, synthetic construct
  source 1..21: mol_type = other RNA; note = Description of Artificial Sequence: Synthetic oligonucleotide
  modified_base 1: mod_base = OTHER; note = 2'-O-methyladenosine-3'-phosphorothioate
  modified_base 2: mod_base = OTHER; note = 2'-O-methylguanosine-3'-phosphorothioate
  modified_base 3: mod_base = OTHER; note = 2'-O-methyladenosine-3'-phosphate
  modified_base 4: mod_base = OTHER; note = 2'-O-methyluridine-3'-phosphate
  modified_base 5: mod_base = OTHER; note = 2'-O-methyladenosine-3'-phosphate
  modified_base 6: mod_base = OTHER; note = 2'-O-methylcytidine-3'-phosphate
  modified_base 7: mod_base = OTHER; note = 2'-fluorouridine-3'-phosphate
  modified_base 8: mod_base = OTHER; note = 2'-O-methyladenosine-3'-phosphate
  modified_base 9: mod_base = OTHER; note = 2'-fluoroadenosine-3'-phosphate
  modified_base 10: mod_base = OTHER; note = 2'-fluoroadenosine-3'-phosphate
  modified_base 11: mod_base = OTHER; note = 2'-fluoroguanosine-3'-phosphate
  modified_base 12: mod_base = OTHER; note = 2'-O-methylguanosine-3'-phosphate
  modified_base 13: mod_base = OTHER; note = 2'-O-methyladenosine-3'-phosphate
  modified_base 14: mod_base = OTHER; note = 2'-O-methyladenosine-3'-phosphate
  modified_base 15: mod_base = OTHER; note = 2'-O-methylguanosine-3'-phosphate
  modified_base 16: mod_base = OTHER; note = 2'-O-methyladenosine-3'-phosphate
  modified_base 17: mod_base = OTHER; note = 2'-O-methyladenosine-3'-phosphate
  modified_base 18: mod_base = OTHER; note = 2'-O-methyluridine-3'-phosphate
  modified_base 19: mod_base = OTHER; note = 2'-O-methyluridine-3'-phosphate
  modified_base 20: mod_base = OTHER; note = 2'-O-methylcytidine-3'-phosphate
  modified_base 21: mod_base = OTHER; note = 2'-O-methylcytidine-3'-phosphate N-[tris(GalNAc-alkyl)-amidodecanoyl)]-4-hydroxyprolinol Hyp-(GalNAc-alkyl)3
agatactaaaggaagaattcc

SEQ ID NO: 2805 - RNA, 23 nt, synthetic construct
  source 1..23: mol_type = other RNA; note = Description of Artificial Sequence: Synthetic oligonucleotide
  modified_base 1: mod_base = OTHER; note = 2'-O-methylguanosine-3'-phosphorothioate
  modified_base 2: mod_base = OTHER; note = 2'-fluoroguanosine-3'-phosphorothioate
  modified_base 3: mod_base = OTHER; note = 2'-O-methyladenosine-3'-phosphate
  modified_base 4: mod_base = OTHER; note = 2'-O-methyladenosine-3'-phosphate
  modified_base 5: mod_base = OTHER; note = 2'-O-methyluridine-3'-phosphate
  modified_base 6: mod_base = OTHER; note = 2'-fluorouridine-3'-phosphate
  modified_base 7: mod_base = OTHER; note = 2'-O-methylcytidine-3'-phosphate
  modified_base 8: mod_base = OTHER; note = 2'-fluorouridine-3'-phosphate
  modified_base 9: mod_base = OTHER; note = 2'-fluorouridine-3'-phosphate
  modified_base 10: mod_base = OTHER; note = 2'-O-methylcytidine-3'-phosphate
  modified_base 11: mod_base = OTHER; note = 2'-O-methylcytidine-3'-phosphate
  modified_base 12: mod_base = OTHER; note = 2'-O-methyluridine-3'-phosphate
  modified_base 13: mod_base = OTHER; note = 2'-O-methyluridine-3'-phosphate
  modified_base 14: mod_base = OTHER; note = 2'-fluorouridine-3'-phosphate
  modified_base 15: mod_base = OTHER; note = 2'-O-methyladenosine-3'-phosphate
  modified_base 16: mod_base = OTHER; note = 2'-fluoroguanosine-3'-phosphate
  modified_base 17: mod_base = OTHER; note = 2'-O-methyluridine-3'-phosphate
  modified_base 18: mod_base = OTHER; note = 2'-O-methyladenosine-3'-phosphate
  modified_base 19: mod_base = OTHER; note = 2'-O-methyluridine-3'-phosphate
  modified_base 20: mod_base = OTHER; note = 2'-O-methylcytidine-3'-phosphate
  modified_base 21: mod_base = OTHER; note = 2'-O-methyluridine-3'-phosphorothioate
  modified_base 22: mod_base = OTHER; note = 2'-O-methylcytidine-3'-phosphorothioate
  modified_base 23: mod_base = OTHER; note = 2'-O-methylguanosine-3'-phosphate
ggaattcttcctttagtatctcg

SEQ ID NO: 2806 - RNA, 21 nt, synthetic construct
  source 1..21: mol_type = other RNA; note = Description of Artificial Sequence: Synthetic oligonucleotide
  modified_base 1: mod_base = OTHER; note = 2'-O-methylcytidine-3'-phosphorothioate
  modified_base 2: mod_base = OTHER; note = 2'-O-methylcytidine-3'-phosphorothioate
  modified_base 3: mod_base = OTHER; note = 2'-O-methyluridine-3'-phosphate
  modified_base 4: mod_base = OTHER; note = 2'-O-methylcytidine-3'-phosphate
  modified_base 5: mod_base = OTHER; note = 2'-O-methylguanosine-3'-phosphate
  modified_base 6: mod_base = OTHER; note = 2'-O-methyladenosine-3'-phosphate
  modified_base 7: mod_base = OTHER; note = 2'-fluoroguanosine-3'-phosphate
  modified_base 8: mod_base = OTHER; note = 2'-O-methyladenosine-3'-phosphate
  modified_base 9: mod_base = OTHER; note = 2'-fluorouridine-3'-phosphate
  modified_base 10: mod_base = OTHER; note = 2'-fluoroadenosine-3'-phosphate
  modified_base 11: mod_base = OTHER; note = 2'-fluorocytidine-3'-phosphate
  modified_base 12: mod_base = OTHER; note = 2'-O-methyluridine-3'-phosphate
  modified_base 13: mod_base = OTHER; note = 2'-O-methyladenosine-3'-phosphate
  modified_base 14: mod_base = OTHER; note = 2'-O-methyladenosine-3'-phosphate
  modified_base 15: mod_base = OTHER; note = 2'-O-methyladenosine-3'-phosphate
  modified_base 16: mod_base = OTHER; note = 2'-O-methylguanosine-3'-phosphate
  modified_base 17: mod_base = OTHER; note = 2'-O-methylguanosine-3'-phosphate
  modified_base 18: mod_base = OTHER; note = 2'-O-methyladenosine-3'-phosphate
  modified_base 19: mod_base = OTHER; note = 2'-O-methyladenosine-3'-phosphate
  modified_base 20: mod_base = OTHER; note = 2'-O-methylguanosine-3'-phosphate
  modified_base 21: mod_base = OTHER; note = 2'-O-methyladenosine-3'-phosphate N-[tris(GalNAc-alkyl)-amidodecanoyl)]-4-hydroxyprolinol Hyp-(GalNAc-alkyl)3
cctcgagatactaaaggaaga

SEQ ID NO: 2807 - RNA, 23 nt, synthetic construct
  source 1..23: mol_type = other RNA; note = Description of Artificial Sequence: Synthetic oligonucleotide
  modified_base 1: mod_base = OTHER; note = 2'-O-methyluridine-3'-phosphorothioate
  modified_base 2: mod_base = OTHER; note = 2'-fluorocytidine-3'-phosphorothioate
  modified_base 3: mod_base = OTHER; note = 2'-O-methyluridine-3'-phosphate
  modified_base 4: mod_base = OTHER; note = 2'-O-methyluridine-3'-phosphate
  modified_base 5: mod_base = OTHER; note = 2'-O-methylcytidine-3'-phosphate
  modified_base 6: mod_base = OTHER; note = 2'-fluorocytidine-3'-phosphate
  modified_base 7: mod_base = OTHER; note = 2'-O-methyluridine-3'-phosphate
  modified_base 8: mod_base = OTHER; note = 2'-fluorouridine-3'-phosphate
  modified_base 9: mod_base = OTHER; note = 2'-fluorouridine-3'-phosphate
  modified_base 10: mod_base = OTHER; note = 2'-O-methyladenosine-3'-phosphate
  modified_base 11: mod_base = OTHER; note = 2'-O-methylguanosine-3'-phosphate
  modified_base 12: mod_base = OTHER; note = 2'-O-methyluridine-3'-phosphate
  modified_base 13: mod_base = OTHER; note = 2'-O-methyladenosine-3'-phosphate
  modified_base 14: mod_base = OTHER; note = 2'-fluorouridine-3'-phosphate
  modified_base 15: mod_base = OTHER; note = 2'-O-methylcytidine-3'-phosphate
  modified_base 16: mod_base = OTHER; note = 2'-fluorouridine-3'-phosphate
  modified_base 17: mod_base = OTHER; note = 2'-O-methylcytidine-3'-phosphate
  modified_base 18: mod_base = OTHER; note = 2'-O-methylguanosine-3'-phosphate
  modified_base 19: mod_base = OTHER; note = 2'-O-methyladenosine-3'-phosphate
  modified_base 20: mod_base = OTHER; note = 2'-O-methylguanosine-3'-phosphate
  modified_base 21: mod_base = OTHER; note = 2'-O-methylguanosine-3'-phosphorothioate
  modified_base 22: mod_base = OTHER; note = 2'-O-methyladenosine-3'-phosphorothioate
  modified_base 23: mod_base = OTHER; note = 2'-O-methylcytidine-3'-phosphate
tcttcctttagtatctcgaggac

SEQ ID NO: 2808 - RNA, 21 nt, synthetic construct
  source 1..21: mol_type = other RNA; note = Description of Artificial Sequence: Synthetic oligonucleotide
  modified_base 1: mod_base = OTHER; note = 2'-O-methyluridine-3'-phosphorothioate
  modified_base 2: mod_base = OTHER; note = 2'-O-methylcytidine-3'-phosphorothioate
  modified_base 3: mod_base = OTHER; note = 2'-O-methylcytidine-3'-phosphate
  modified_base 4: mod_base = OTHER; note = 2'-O-methyluridine-3'-phosphate
  modified_base 5: mod_base = OTHER; note = 2'-O-methylcytidine-3'-phosphate
  modified_base 6: mod_base = OTHER; note = 2'-O-methylguanosine-3'-phosphate
  modified_base 7: mod_base = OTHER; note = 2'-fluoroadenosine-3'-phosphate
  modified_base 8: mod_base = OTHER; note = 2'-O-methylguanosine-3'-phosphate
  modified_base 9: mod_base = OTHER; note = 2'-fluoroadenosine-3'-phosphate
  modified_base 10: mod_base = OTHER; note = 2'-fluorouridine-3'-phosphate
  modified_base 11: mod_base = OTHER; note = 2'-fluoroadenosine-3'-phosphate
  modified_base 12: mod_base = OTHER; note = 2'-O-methylcytidine-3'-phosphate
  modified_base 13: mod_base = OTHER; note = 2'-O-methyluridine-3'-phosphate
  modified_base 14: mod_base = OTHER; note = 2'-O-methyladenosine-3'-phosphate
  modified_base 15: mod_base = OTHER; note = 2'-O-methyladenosine-3'-phosphate
  modified_base 16: mod_base = OTHER; note = 2'-O-methyladenosine-3'-phosphate
  modified_base 17: mod_base = OTHER; note = 2'-O-methylguanosine-3'-phosphate
  modified_base 18: mod_base = OTHER; note = 2'-O-methylguanosine-3'-phosphate
  modified_base 19: mod_base = OTHER; note = 2'-O-methyladenosine-3'-phosphate
  modified_base 20: mod_base = OTHER; note = 2'-O-methyladenosine-3'-phosphate
  modified_base 21: mod_base = OTHER; note = 2'-O-methylguanosine-3'-phosphate N-[tris(GalNAc-alkyl)-amidodecanoyl)]-4-hydroxyprolinol Hyp-(GalNAc-alkyl)3
tcctcgagatactaaaggaag

SEQ ID NO: 2809 - RNA, 23 nt, synthetic construct
  source 1..23: mol_type = other RNA; note = Description of Artificial Sequence: Synthetic oligonucleotide
  modified_base 1: mod_base = OTHER; note = 2'-O-methylcytidine-3'-phosphorothioate
  modified_base 2: mod_base = OTHER; note = 2'-fluorouridine -3'-phosphorothioate
  modified_base 3: mod_base = OTHER; note = 2'-O-methyluridine-3'-phosphate
  modified_base 4: mod_base = OTHER; note = 2'-O-methylcytidine-3'-phosphate
  modified_base 5: mod_base = OTHER; note = 2'-O-methylcytidine-3'-phosphate
  modified_base 6: mod_base = OTHER; note = 2'-fluorouridine-3'-phosphate
  modified_base 7: mod_base = OTHER; note = 2'-O-methyluridine-3'-phosphate
  modified_base 8: mod_base = OTHER; note = 2'-fluorouridine-3'-phosphate
  modified_base 9: mod_base = OTHER; note = 2'-fluoroadenosine-3'-phosphate
  modified_base 10: mod_base = OTHER; note = 2'-O-methylguanosine-3'-phosphate
  modified_base 11: mod_base = OTHER; note = 2'-O-methyluridine-3'-phosphate
  modified_base 12: mod_base = OTHER; note = 2'-O-methyladenosine-3'-phosphate
  modified_base 13: mod_base = OTHER; note = 2'-O-methyluridine-3'-phosphate
  modified_base 14: mod_base = OTHER; note = 2'-fluorocytidine-3'-phosphate
  modified_base 15: mod_base = OTHER; note = 2'-O-methyluridine-3'-phosphate
  modified_base 16: mod_base = OTHER; note = 2'-fluorocytidine-3'-phosphate
  modified_base 17: mod_base = OTHER; note = 2'-O-methylguanosine-3'-phosphate
  modified_base 18: mod_base = OTHER; note = 2'-O-methyladenosine-3'-phosphate
  modified_base 19: mod_base = OTHER; note = 2'-O-methylguanosine-3'-phosphate
  modified_base 20: mod_base = OTHER; note = 2'-O-methylguanosine-3'-phosphate
  modified_base 21: mod_base = OTHER; note = 2'-O-methyladenosine-3'-phosphorothioate
  modified_base 22: mod_base = OTHER; note = 2'-O-methylcytidine-3'-phosphorothioate
  modified_base 23: mod_base = OTHER; note = 2'-O-methyladenosine-3'-phosphate
cttcctttagtatctcgaggaca

SEQ ID NO: 2810 - RNA, 21 nt, synthetic construct
  source 1..21: mol_type = other RNA; note = Description of Artificial Sequence: Synthetic oligonucleotide
  modified_base 1: mod_base = OTHER; note = 2'-O-methyladenosine-3'-phosphorothioate
  modified_base 2: mod_base = OTHER; note = 2'-O-methylcytidine-3'-phosphorothioate
  modified_base 3: mod_base = OTHER; note = 2'-O-methyladenosine-3'-phosphate
  modified_base 4: mod_base = OTHER; note = 2'-O-methyladenosine-3'-phosphate
  modified_base 5: mod_base = OTHER; note = 2'-O-methylcytidine-3'-phosphate
  modified_base 6: mod_base = OTHER; note = 2'-O-methyluridine-3'-phosphate
  modified_base 7: mod_base = OTHER; note = 2'-fluorocytidine-3'-phosphate
  modified_base 8: mod_base = OTHER; note = 2'-O-methyladenosine-3'-phosphate
  modified_base 9: mod_base = OTHER; note = 2'-fluoroguanosine-3'-phosphate
  modified_base 10: mod_base = OTHER; note = 2'-fluoroguanosine-3'-phosphate
  modified_base 11: mod_base = OTHER; note = 2'-fluoroadenosine-3'-phosphate
  modified_base 12: mod_base = OTHER; note = 2'-O-methyluridine-3'-phosphate
  modified_base 13: mod_base = OTHER; note = 2'-O-methylguanosine-3'-phosphate
  modified_base 14: mod_base = OTHER; note = 2'-O-methyladenosine-3'-phosphate
  modified_base 15: mod_base = OTHER; note = 2'-O-methyladenosine-3'-phosphate
  modified_base 16: mod_base = OTHER; note = 2'-O-methyladenosine-3'-phosphate
  modified_base 17: mod_base = OTHER; note = 2'-O-methyladenosine-3'-phosphate
  modified_base 18: mod_base = OTHER; note = 2'-O-methyladenosine-3'-phosphate
  modified_base 19: mod_base = OTHER; note = 2'-O-methyluridine-3'-phosphate
  modified_base 20: mod_base = OTHER; note = 2'-O-methyluridine-3'-phosphate
  modified_base 21: mod_base = OTHER; note = 2'-O-methyluridine-3'-phosphate N-[tris(GalNAc-alkyl)-amidodecanoyl)]-4-hydroxyprolinol Hyp-(GalNAc-alkyl)3
acaactcaggatgaaaaattt

SEQ ID NO: 2811 - RNA, 23 nt, synthetic construct
  source 1..23: mol_type = other RNA; note = Description of Artificial Sequence: Synthetic oligonucleotide
  modified_base 1: mod_base = OTHER; note = 2'-O-methyladenosine-3'-phosphorothioate
  modified_base 2: mod_base = OTHER; note = 2'-fluoroadenosine-3'-phosphorothioate
  modified_base 3: mod_base = OTHER; note = 2'-O-methyladenosine-3'-phosphate
  modified_base 4: mod_base = OTHER; note = 2'-O-methyluridine-3'-phosphate
  modified_base 5: mod_base = OTHER; note = 2'-O-methyluridine-3'-phosphate
  modified_base 6: mod_base = OTHER; note = 2'-fluorouridine-3'-phosphate
  modified_base 7: mod_base = OTHER; note = 2'-O-methyluridine-3'-phosphate
  modified_base 8: mod_base = OTHER; note = 2'-fluorouridine-3'-phosphate
  modified_base 9: mod_base = OTHER; note = 2'-fluorocytidine-3'-phosphate
  modified_base 10: mod_base = OTHER; note = 2'-O-methyladenosine-3'-phosphate
  modified_base 11: mod_base = OTHER; note = 2'-O-methyluridine-3'-phosphate
  modified_base 12: mod_base = OTHER; note = 2'-O-methylcytidine-3'-phosphate
  modified_base 13: mod_base = OTHER; note = 2'-O-methylcytidine-3'-phosphate
  modified_base 14: mod_base = OTHER; note = 2'-fluorouridine-3'-phosphate
  modified_base 15: mod_base = OTHER; note = 2'-O-methylguanosine-3'-phosphate
  modified_base 16: mod_base = OTHER; note = 2'-fluoroadenosine-3'-phosphate
  modified_base 17: mod_base = OTHER; note = 2'-O-methylguanosine-3'-phosphate
  modified_base 18: mod_base = OTHER; note = 2'-O-methyluridine-3'-phosphate
  modified_base 19: mod_base = OTHER; note = 2'-O-methyluridine-3'-phosphate
  modified_base 20: mod_base = OTHER; note = 2'-O-methylguanosine-3'-phosphate
  modified_base 21: mod_base = OTHER; note = 2'-O-methyluridine-3'-phosphorothioate
  modified_base 22: mod_base = OTHER; note = 2'-O-methylguanosine-3'-phosphorothioate
  modified_base 23: mod_base = OTHER; note = 2'-O-methylguanosine-3'-phosphate
aaatttttcatcctgagttgtgg

SEQ ID NO: 2812 - RNA, 21 nt, synthetic construct
  source 1..21: mol_type = other RNA; note = Description of Artificial Sequence: Synthetic oligonucleotide
  modified_base 1: mod_base = OTHER; note = 2'-O-methylcytidine-3'-phosphorothioate
  modified_base 2: mod_base = OTHER; note = 2'-O-methyladenosine-3'-phosphorothioate
  modified_base 3: mod_base = OTHER; note = 2'-O-methyladenosine-3'-phosphate
  modified_base 4: mod_base = OTHER; note = 2'-O-methylcytidine-3'-phosphate
  modified_base 5: mod_base = OTHER; note = 2'-O-methyluridine-3'-phosphate
  modified_base 6: mod_base = OTHER; note = 2'-O-methylcytidine-3'-phosphate
  modified_base 7: mod_base = OTHER; note = 2'-fluoroadenosine-3'-phosphate
  modified_base 8: mod_base = OTHER; note = 2'-O-methylguanosine-3'-phosphate
  modified_base 9: mod_base = OTHER; note = 2'-fluoroguanosine-3'-phosphate
  modified_base 10: mod_base = OTHER; note = 2'-fluoroadenosine-3'-phosphate
  modified_base 11: mod_base = OTHER; note = 2'-fluorouridine-3'-phosphate
  modified_base 12: mod_base = OTHER; note = 2'-O-methylguanosine-3'-phosphate
  modified_base 13: mod_base = OTHER; note = 2'-O-methyladenosine-3'-phosphate
  modified_base 14: mod_base = OTHER; note = 2'-O-methyladenosine-3'-phosphate
  modified_base 15: mod_base = OTHER; note = 2'-O-methyladenosine-3'-phosphate
  modified_base 16: mod_base = OTHER; note = 2'-O-methyladenosine-3'-phosphate
  modified_base 17: mod_base = OTHER; note = 2'-O-methyladenosine-3'-phosphate
  modified_base 18: mod_base = OTHER; note = 2'-O-methyluridine-3'-phosphate
  modified_base 19: mod_base = OTHER; note = 2'-O-methyluridine-3'-phosphate
  modified_base 20: mod_base = OTHER; note = 2'-O-methyluridine-3'-phosphate
  modified_base 21: mod_base = OTHER; note = 2'-O-methyluridine-3'-phosphate N-[tris(GalNAc-alkyl)-amidodecanoyl)]-4-hydroxyprolinol Hyp-(GalNAc-alkyl)3
caactcaggatgaaaaatttt

SEQ ID NO: 2813 - RNA, 23 nt, synthetic construct
  source 1..23: mol_type = other RNA; note = Description of Artificial Sequence: Synthetic oligonucleotide
  modified_base 1: mod_base = OTHER; note = 2'-O-methyladenosine-3'-phosphorothioate
  modified_base 2: mod_base = OTHER; note = 2'-fluoroadenosine-3'-phosphorothioate
  modified_base 3: mod_base = OTHER; note = 2'-O-methyladenosine-3'-phosphate
  modified_base 4: mod_base = OTHER; note = 2'-O-methyladenosine-3'-phosphate
  modified_base 5: mod_base = OTHER; note = 2'-O-methyluridine-3'-phosphate
  modified_base 6: mod_base = OTHER; note = 2'-fluorouridine-3'-phosphate
  modified_base 7: mod_base = OTHER; note = 2'-O-methyluridine-3'-phosphate
  modified_base 8: mod_base = OTHER; note = 2'-fluorouridine-3'-phosphate
  modified_base 9: mod_base = OTHER; note = 2'-fluorouridine-3'-phosphate
  modified_base 10: mod_base = OTHER; note = 2'-O-methylcytidine-3'-phosphate
  modified_base 11: mod_base = OTHER; note = 2'-O-methyladenosine-3'-phosphate
  modified_base 12: mod_base = OTHER; note = 2'-O-methyluridine-3'-phosphate
  modified_base 13: mod_base = OTHER; note = 2'-O-methylcytidine-3'-phosphate
  modified_base 14: mod_base = OTHER; note = 2'-fluorocytidine-3'-phosphate
  modified_base 15: mod_base = OTHER; note = 2'-O-methyluridine-3'-phosphate
  modified_base 16: mod_base = OTHER; note = 2'-fluoroguanosine-3'-phosphate
  modified_base 17: mod_base = OTHER; note = 2'-O-methyladenosine-3'-phosphate
  modified_base 18: mod_base = OTHER; note = 2'-O-methylguanosine-3'-phosphate
  modified_base 19: mod_base = OTHER; note = 2'-O-methyluridine-3'-phosphate
  modified_base 20: mod_base = OTHER; note = 2'-O-methyluridine-3'-phosphate
  modified_base 21: mod_base = OTHER; note = 2'-O-methylguanosine-3'-phosphorothioate
  modified_base 22: mod_base = OTHER; note = 2'-O-methyluridine-3'-phosphorothioate
  modified_base 23: mod_base = OTHER; note = 2'-O-methylguanosine-3'-phosphate
aaaatttttcatcctgagttgtg

SEQ ID NO: 2814 - RNA, 21 nt, synthetic construct
  source 1..21: mol_type = other RNA; note = Description of Artificial Sequence: Synthetic oligonucleotide
  modified_base 1: mod_base = OTHER; note = 2'-O-methylcytidine-3'-phosphorothioate
  modified_base 2: mod_base = OTHER; note = 2'-O-methylguanosine-3'-phosphorothioate
  modified_base 3: mod_base = OTHER; note = 2'-O-methylcytidine-3'-phosphate
  modified_base 4: mod_base = OTHER; note = 2'-O-methylcytidine-3'-phosphate
  modified_base 5: mod_base = OTHER; note = 2'-O-methyladenosine-3'-phosphate
  modified_base 6: mod_base = OTHER; note = 2'-O-methylcytidine-3'-phosphate
  modified_base 7: mod_base = OTHER; note = 2'-fluoroadenosine-3'-phosphate
  modified_base 8: mod_base = OTHER; note = 2'-O-methyladenosine-3'-phosphate
  modified_base 9: mod_base = OTHER; note = 2'-fluorocytidine-3'-phosphate
  modified_base 10: mod_base = OTHER; note = 2'-fluorouridine-3'-phosphate
  modified_base 11: mod_base = OTHER; note = 2'-fluorocytidine-3'-phosphate
  modified_base 12: mod_base = OTHER; note = 2'-O-methyladenosine-3'-phosphate
  modified_base 13: mod_base = OTHER; note = 2'-O-methylguanosine-3'-phosphate
  modified_base 14: mod_base = OTHER; note = 2'-O-methylguanosine-3'-phosphate
  modified_base 15: mod_base = OTHER; note = 2'-O-methyladenosine-3'-phosphate
  modified_base 16: mod_base = OTHER; note = 2'-O-methyluridine-3'-phosphate
  modified_base 17: mod_base = OTHER; note = 2'-O-methylguanosine-3'-phosphate
  modified_base 18: mod_base = OTHER; note = 2'-O-methyladenosine-3'-phosphate
  modified_base 19: mod_base = OTHER; note = 2'-O-methyladenosine-3'-phosphate
  modified_base 20: mod_base = OTHER; note = 2'-O-methyladenosine-3'-phosphate
  modified_base 21: mod_base = OTHER; note = 2'-O-methyladenosine-3'-phosphate N-[tris(GalNAc-alkyl)-amidodecanoyl)]-4-hydroxyprolinol Hyp-(GalNAc-alkyl)3
cgccacaactcaggatgaaaa

SEQ ID NO: 2815 - RNA, 23 nt, synthetic construct
  source 1..23: mol_type = other RNA; note = Description of Artificial Sequence: Synthetic oligonucleotide
  modified_base 1: mod_base = OTHER; note = 2'-O-methyluridine-3'-phosphorothioate
  modified_base 2: mod_base = OTHER; note = 2'-fluorouridine -3'-phosphorothioate
  modified_base 3: mod_base = OTHER; note = 2'-O-methyluridine-3'-phosphate
  modified_base 4: mod_base = OTHER; note = 2'-O-methyluridine-3'-phosphate
  modified_base 5: mod_base = OTHER; note = 2'-O-methylcytidine-3'-phosphate
  modified_base 6: mod_base = OTHER; note = 2'-fluoroadenosine-3'-phosphate
  modified_base 7: mod_base = OTHER; note = 2'-O-methyluridine-3'-phosphate
  modified_base 8: mod_base = OTHER; note = 2'-fluorocytidine-3'-phosphate
  modified_base 9: mod_base = OTHER; note = 2'-fluorocytidine-3'-phosphate
  modified_base 10: mod_base = OTHER; note = 2'-O-methyluridine-3'-phosphate
  modified_base 11: mod_base = OTHER; note = 2'-O-methylguanosine-3'-phosphate
  modified_base 12: mod_base = OTHER; note = 2'-O-methyladenosine-3'-phosphate
  modified_base 13: mod_base = OTHER; note = 2'-O-methylguanosine-3'-phosphate
  modified_base 14: mod_base = OTHER; note = 2'-fluorouridine-3'-phosphate
  modified_base 15: mod_base = OTHER; note = 2'-O-methyluridine-3'-phosphate
  modified_base 16: mod_base = OTHER; note = 2'-fluoroguanosine-3'-phosphate
  modified_base 17: mod_base = OTHER; note = 2'-O-methyluridine-3'-phosphate
  modified_base 18: mod_base = OTHER; note = 2'-O-methylguanosine-3'-phosphate
  modified_base 19: mod_base = OTHER; note = 2'-O-methylguanosine-3'-phosphate
  modified_base 20: mod_base = OTHER; note = 2'-O-methylcytidine-3'-phosphate
  modified_base 21: mod_base = OTHER; note = 2'-O-methylguanosine-3'-phosphorothioate
  modified_base 22: mod_base = OTHER; note = 2'-O-methylguanosine-3'-phosphorothioate
  modified_base 23: mod_base = OTHER; note = 2'-O-methylcytidine-3'-phosphate
ttttcatcctgagttgtggcggc

SEQ ID NO: 2816 - RNA, 21 nt, synthetic construct
  source 1..21: mol_type = other RNA; note = Description of Artificial Sequence: Synthetic oligonucleotide
  modified_base 1: mod_base = OTHER; note = 2'-O-methylcytidine-3'-phosphorothioate
  modified_base 2: mod_base = OTHER; note = 2'-O-methylcytidine-3'-phosphorothioate
  modified_base 3: mod_base = OTHER; note = 2'-O-methylguanosine-3'-phosphate
  modified_base 4: mod_base = OTHER; note = 2'-O-methylcytidine-3'-phosphate
  modified_base 5: mod_base = OTHER; note = 2'-O-methylcytidine-3'-phosphate
  modified_base 6: mod_base = OTHER; note = 2'-O-methyladenosine-3'-phosphate
  modified_base 7: mod_base = OTHER; note = 2'-fluorocytidine-3'-phosphate
  modified_base 8: mod_base = OTHER; note = 2'-O-methyladenosine-3'-phosphate
  modified_base 9: mod_base = OTHER; note = 2'-fluoroadenosine-3'-phosphate
  modified_base 10: mod_base = OTHER; note = 2'-fluorocytidine-3'-phosphate
  modified_base 11: mod_base = OTHER; note = 2'-fluorouridine-3'-phosphate
  modified_base 12: mod_base = OTHER; note = 2'-O-methylcytidine-3'-phosphate
  modified_base 13: mod_base = OTHER; note = 2'-O-methyladenosine-3'-phosphate
  modified_base 14: mod_base = OTHER; note = 2'-O-methylguanosine-3'-phosphate
  modified_base 15: mod_base = OTHER; note = 2'-O-methylguanosine-3'-phosphate
  modified_base 16: mod_base = OTHER; note = 2'-O-methyladenosine-3'-phosphate
  modified_base 17: mod_base = OTHER; note = 2'-O-methyluridine-3'-phosphate
  modified_base 18: mod_base = OTHER; note = 2'-O-methylguanosine-3'-phosphate
  modified_base 19: mod_base = OTHER; note = 2'-O-methyladenosine-3'-phosphate
  modified_base 20: mod_base = OTHER; note = 2'-O-methyladenosine-3'-phosphate
  modified_base 21: mod_base = OTHER; note = 2'-O-methyladenosine-3'-phosphate N-[tris(GalNAc-alkyl)-amidodecanoyl)]-4-hydroxyprolinol Hyp-(GalNAc-alkyl)3
ccgccacaactcaggatgaaa

SEQ ID NO: 2817 - RNA, 23 nt, synthetic construct
  source 1..23: mol_type = other RNA; note = Description of Artificial Sequence: Synthetic oligonucleotide
  modified_base 1: mod_base = OTHER; note = 2'-O-methyluridine-3'-phosphorothioate
  modified_base 2: mod_base = OTHER; note = 2'-fluorouridine -3'-phosphorothioate
  modified_base 3: mod_base = OTHER; note = 2'-O-methyluridine-3'-phosphate
  modified_base 4: mod_base = OTHER; note = 2'-O-methylcytidine-3'-phosphate
  modified_base 5: mod_base = OTHER; note = 2'-O-methyladenosine-3'-phosphate
  modified_base 6: mod_base = OTHER; note = 2'-fluorouridine-3'-phosphate
  modified_base 7: mod_base = OTHER; note = 2'-O-methylcytidine-3'-phosphate
  modified_base 8: mod_base = OTHER; note = 2'-fluorocytidine-3'-phosphate
  modified_base 9: mod_base = OTHER; note = 2'-fluorouridine-3'-phosphate
  modified_base 10: mod_base = OTHER; note = 2'-O-methylguanosine-3'-phosphate
  modified_base 11: mod_base = OTHER; note = 2'-O-methyladenosine-3'-phosphate
  modified_base 12: mod_base = OTHER; note = 2'-O-methylguanosine-3'-phosphate
  modified_base 13: mod_base = OTHER; note = 2'-O-methyluridine-3'-phosphate
  modified_base 14: mod_base = OTHER; note = 2'-fluorouridine-3'-phosphate
  modified_base 15: mod_base = OTHER; note = 2'-O-methylguanosine-3'-phosphate
  modified_base 16: mod_base = OTHER; note = 2'-fluorouridine-3'-phosphate
  modified_base 17: mod_base = OTHER; note = 2'-O-methylguanosine-3'-phosphate
  modified_base 18: mod_base = OTHER; note = 2'-O-methylguanosine-3'-phosphate
  modified_base 19: mod_base = OTHER; note = 2'-O-methylcytidine-3'-phosphate
  modified_base 20: mod_base = OTHER; note = 2'-O-methylguanosine-3'-phosphate
  modified_base 21: mod_base = OTHER; note = 2'-O-methylguanosine-3'-phosphorothioate
  modified_base 22: mod_base = OTHER; note = 2'-O-methylcytidine-3'-phosphorothioate
  modified_base 23: mod_base = OTHER; note = 2'-O-methyladenosine-3'-phosphate
tttcatcctgagttgtggcggca

SEQ ID NO: 2818 - RNA, 21 nt, synthetic construct
  source 1..21: mol_type = other RNA; note = Description of Artificial Sequence: Synthetic oligonucleotide
  modified_base 1: mod_base = OTHER; note = 2'-O-methyladenosine-3'-phosphorothioate
  modified_base 2: mod_base = OTHER; note = 2'-O-methylguanosine-3'-phosphorothioate
  modified_base 3: mod_base = OTHER; note = 2'-O-methylguanosine-3'-phosphate
  modified_base 4: mod_base = OTHER; note = 2'-O-methylguanosine-3'-phosphate
  modified_base 5: mod_base = OTHER; note = 2'-O-methyladenosine-3'-phosphate
  modified_base 6: mod_base = OTHER; note = 2'-O-methyladenosine-3'-phosphate
  modified_base 7: mod_base = OTHER; note = 2'-fluoroguanosine-3'-phosphate
  modified_base 8: mod_base = OTHER; note = 2'-O-methylguanosine-3'-phosphate
  modified_base 9: mod_base = OTHER; note = 2'-fluorouridine-3'-phosphate
  modified_base 10: mod_base = OTHER; note = 2'-fluoroguanosine-3'-phosphate
  modified_base 11: mod_base = OTHER; note = 2'-fluoroguanosine-3'-phosphate
  modified_base 12: mod_base = OTHER; note = 2'-O-methyladenosine-3'-phosphate
  modified_base 13: mod_base = OTHER; note = 2'-O-methyladenosine-3'-phosphate
  modified_base 14: mod_base = OTHER; note = 2'-O-methylguanosine-3'-phosphate
  modified_base 15: mod_base = OTHER; note = 2'-O-methyluridine-3'-phosphate
  modified_base 16: mod_base = OTHER; note = 2'-O-methylcytidine-3'-phosphate
  modified_base 17: mod_base = OTHER; note = 2'-O-methyluridine-3'-phosphate
  modified_base 18: mod_base = OTHER; note = 2'-O-methyluridine-3'-phosphate
  modified_base 19: mod_base = OTHER; note = 2'-O-methylcytidine-3'-phosphate
  modified_base 20: mod_base = OTHER; note = 2'-O-methylcytidine-3'-phosphate
  modified_base 21: mod_base = OTHER; note = 2'-O-methyluridine-3'-phosphate N-[tris(GalNAc-alkyl)-amidodecanoyl)]-4-hydroxyprolinol Hyp-(GalNAc-alkyl)3
agggaaggtggaagtcttcct

SEQ ID NO: 2819 - RNA, 23 nt, synthetic construct
  source 1..23: mol_type = other RNA; note = Description of Artificial Sequence: Synthetic oligonucleotide
  modified_base 1: mod_base = OTHER; note = 2'-O-methyladenosine-3'-phosphorothioate
  modified_base 2: mod_base = OTHER; note = 2'-fluoroguanosine-3'-phosphorothioate
  modified_base 3: mod_base = OTHER; note = 2'-O-methylguanosine-3'-phosphate
  modified_base 4: mod_base = OTHER; note = 2'-O-methyladenosine-3'-phosphate
  modified_base 5: mod_base = OTHER; note = 2'-O-methyladenosine-3'-phosphate
  modified_base 6: mod_base = OTHER; note = 2'-fluoroguanosine-3'-phosphate
  modified_base 7: mod_base = OTHER; note = 2'-O-methyladenosine-3'-phosphate
  modified_base 8: mod_base = OTHER; note = 2'-fluorocytidine-3'-phosphate
  modified_base 9: mod_base = OTHER; note = 2'-fluorouridine-3'-phosphate
  modified_base 10: mod_base = OTHER; note = 2'-O-methyluridine-3'-phosphate
  modified_base 11: mod_base = OTHER; note = 2'-O-methylcytidine-3'-phosphate
  modified_base 12: mod_base = OTHER; note = 2'-O-methylcytidine-3'-phosphate
  modified_base 13: mod_base = OTHER; note = 2'-O-methyladenosine-3'-phosphate
  modified_base 14: mod_base = OTHER; note = 2'-fluorocytidine-3'-phosphate
  modified_base 15: mod_base = OTHER; note = 2'-O-methylcytidine-3'-phosphate
  modified_base 16: mod_base = OTHER; note = 2'-fluorouridine-3'-phosphate
  modified_base 17: mod_base = OTHER; note = 2'-O-methyluridine-3'-phosphate
  modified_base 18: mod_base = OTHER; note = 2'-O-methylcytidine-3'-phosphate
  modified_base 19: mod_base = OTHER; note = 2'-O-methylcytidine-3'-phosphate
  modified_base 20: mod_base = OTHER; note = 2'-O-methylcytidine-3'-phosphate
  modified_base 21: mod_base = OTHER; note = 2'-O-methyluridine-3'-phosphorothioate
  modified_base 22: mod_base = OTHER; note = 2'-O-methyluridine-3'-phosphorothioate
  modified_base 23: mod_base = OTHER; note = 2'-O-methylcytidine-3'-phosphate
aggaagacttccaccttcccttc

SEQ ID NO: 2820 - RNA, 21 nt, synthetic construct
  source 1..21: mol_type = other RNA; note = Description of Artificial Sequence: Synthetic oligonucleotide
  modified_base 1: mod_base = OTHER; note = 2'-O-methylguanosine-3'-phosphorothioate
  modified_base 2: mod_base = OTHER; note = 2'-O-methylguanosine-3'-phosphorothioate
  modified_base 3: mod_base = OTHER; note = 2'-O-methylguanosine-3'-phosphate
  modified_base 4: mod_base = OTHER; note = 2'-O-methyladenosine-3'-phosphate
  modified_base 5: mod_base = OTHER; note = 2'-O-methyladenosine-3'-phosphate
  modified_base 6: mod_base = OTHER; note = 2'-O-methylguanosine-3'-phosphate
  modified_base 7: mod_base = OTHER; note = 2'-fluoroguanosine-3'-phosphate
  modified_base 8: mod_base = OTHER; note = 2'-O-methyluridine-3'-phosphate
  modified_base 9: mod_base = OTHER; note = 2'-fluoroguanosine-3'-phosphate
  modified_base 10: mod_base = OTHER; note = 2'-fluoroguanosine-3'-phosphate
  modified_base 11: mod_base = OTHER; note = 2'-fluoroadenosine-3'-phosphate
  modified_base 12: mod_base = OTHER; note = 2'-O-methyladenosine-3'-phosphate
  modified_base 13: mod_base = OTHER; note = 2'-O-methylguanosine-3'-phosphate
  modified_base 14: mod_base = OTHER; note = 2'-O-methyluridine-3'-phosphate
  modified_base 15: mod_base = OTHER; note = 2'-O-methylcytidine-3'-phosphate
  modified_base 16: mod_base = OTHER; note = 2'-O-methyluridine-3'-phosphate
  modified_base 17: mod_base = OTHER; note = 2'-O-methyluridine-3'-phosphate
  modified_base 18: mod_base = OTHER; note = 2'-O-methylcytidine-3'-phosphate
  modified_base 19: mod_base = OTHER; note = 2'-O-methylcytidine-3'-phosphate
  modified_base 20: mod_base = OTHER; note = 2'-O-methyluridine-3'-phosphate
  modified_base 21: mod_base = OTHER; note = 2'-O-methylguanosine-3'-phosphate N-[tris(GalNAc-alkyl)-amidodecanoyl)]-4-hydroxyprolinol Hyp-(GalNAc-alkyl)3
gggaaggtggaagtcttcctg

SEQ ID NO: 2821 - RNA, 23 nt, synthetic construct
  source 1..23: mol_type = other RNA; note = Description of Artificial Sequence: Synthetic oligonucleotide
  modified_base 1: mod_base = OTHER; note = 2'-O-methylcytidine-3'-phosphorothioate
  modified_base 2: mod_base = OTHER; note = 2'-fluoroadenosine-3'-phosphorothioate
  modified_base 3: mod_base = OTHER; note = 2'-O-methylguanosine-3'-phosphate
  modified_base 4: mod_base = OTHER; note = 2'-O-methylguanosine-3'-phosphate
  modified_base 5: mod_base = OTHER; note = 2'-O-methyladenosine-3'-phosphate
  modified_base 6: mod_base = OTHER; note = 2'-fluoroadenosine-3'-phosphate
  modified_base 7: mod_base = OTHER; note = 2'-O-methylguanosine-3'-phosphate
  modified_base 8: mod_base = OTHER; note = 2'-fluoroadenosine-3'-phosphate
  modified_base 9: mod_base = OTHER; note = 2'-fluorocytidine-3'-phosphate
  modified_base 10: mod_base = OTHER; note = 2'-O-methyluridine-3'-phosphate
  modified_base 11: mod_base = OTHER; note = 2'-O-methyluridine-3'-phosphate
  modified_base 12: mod_base = OTHER; note = 2'-O-methylcytidine-3'-phosphate
  modified_base 13: mod_base = OTHER; note = 2'-O-methylcytidine-3'-phosphate
  modified_base 14: mod_base = OTHER; note = 2'-fluoroadenosine-3'-phosphate
  modified_base 15: mod_base = OTHER; note = 2'-O-methylcytidine-3'-phosphate
  modified_base 16: mod_base = OTHER; note = 2'-fluorocytidine-3'-phosphate
  modified_base 17: mod_base = OTHER; note = 2'-O-methyluridine-3'-phosphate
  modified_base 18: mod_base = OTHER; note = 2'-O-methyluridine-3'-phosphate
  modified_base 19: mod_base = OTHER; note = 2'-O-methylcytidine-3'-phosphate
  modified_base 20: mod_base = OTHER; note = 2'-O-methylcytidine-3'-phosphate
  modified_base 21: mod_base = OTHER; note = 2'-O-methylcytidine-3'-phosphorothioate
  modified_base 22: mod_base = OTHER; note = 2'-O-methyluridine-3'-phosphorothioate
  modified_base 23: mod_base = OTHER; note = 2'-O-methyluridine-3'-phosphate
caggaagacttccaccttccctt

SEQ ID NO: 2822 - RNA, 21 nt, synthetic construct
  source 1..21: mol_type = other RNA; note = Description of Artificial Sequence: Synthetic oligonucleotide
  modified_base 1: mod_base = OTHER; note = 2'-O-methyluridine-3'-phosphorothioate
  modified_base 2: mod_base = OTHER; note = 2'-O-methylguanosine-3'-phosphorothioate
  modified_base 3: mod_base = OTHER; note = 2'-O-methylguanosine-3'-phosphate
  modified_base 4: mod_base = OTHER; note = 2'-O-methyladenosine-3'-phosphate
  modified_base 5: mod_base = OTHER; note = 2'-O-methyladenosine-3'-phosphate
  modified_base 6: mod_base = OTHER; note = 2'-O-methylguanosine-3'-phosphate
  modified_base 7: mod_base = OTHER; note = 2'-fluoroguanosine-3'-phosphate
  modified_base 8: mod_base = OTHER; note = 2'-O-methylguanosine-3'-phosphate
  modified_base 9: mod_base = OTHER; note = 2'-fluoroadenosine-3'-phosphate
  modified_base 10: mod_base = OTHER; note = 2'-fluoroadenosine-3'-phosphate
  modified_base 11: mod_base = OTHER; note = 2'-fluoroguanosine-3'-phosphate
  modified_base 12: mod_base = OTHER; note = 2'-O-methylguanosine-3'-phosphate
  modified_base 13: mod_base = OTHER; note = 2'-O-methyluridine-3'-phosphate
  modified_base 14: mod_base = OTHER; note = 2'-O-methylguanosine-3'-phosphate
  modified_base 15: mod_base = OTHER; note = 2'-O-methylguanosine-3'-phosphate
  modified_base 16: mod_base = OTHER; note = 2'-O-methyladenosine-3'-phosphate
  modified_base 17: mod_base = OTHER; note = 2'-O-methyladenosine-3'-phosphate
  modified_base 18: mod_base = OTHER; note = 2'-O-methylguanosine-3'-phosphate
  modified_base 19: mod_base = OTHER; note = 2'-O-methyluridine-3'-phosphate
  modified_base 20: mod_base = OTHER; note = 2'-O-methylcytidine-3'-phosphate
  modified_base 21: mod_base = OTHER; note = 2'-O-methyluridine-3'-phosphate N-[tris(GalNAc-alkyl)-amidodecanoyl)]-4-hydroxyprolinol Hyp-(GalNAc-alkyl)3
tggaagggaaggtggaagtct

SEQ ID NO: 2823 - RNA, 23 nt, synthetic construct
  source 1..23: mol_type = other RNA; note = Description of Artificial Sequence: Synthetic oligonucleotide
  modified_base 1: mod_base = OTHER; note = 2'-O-methyladenosine-3'-phosphorothioate
  modified_base 2: mod_base = OTHER; note = 2'-fluoroguanosine-3'-phosphorothioate
  modified_base 3: mod_base = OTHER; note = 2'-O-methyladenosine-3'-phosphate
  modified_base 4: mod_base = OTHER; note = 2'-O-methylcytidine-3'-phosphate
  modified_base 5: mod_base = OTHER; note = 2'-O-methyluridine-3'-phosphate
  modified_base 6: mod_base = OTHER; note = 2'-fluorouridine-3'-phosphate
  modified_base 7: mod_base = OTHER; note = 2'-O-methylcytidine-3'-phosphate
  modified_base 8: mod_base = OTHER; note = 2'-fluorocytidine-3'-phosphate
  modified_base 9: mod_base = OTHER; note = 2'-fluoroadenosine-3'-phosphate
  modified_base 10: mod_base = OTHER; note = 2'-O-methylcytidine-3'-phosphate
  modified_base 11: mod_base = OTHER; note = 2'-O-methylcytidine-3'-phosphate
  modified_base 12: mod_base = OTHER; note = 2'-O-methyluridine-3'-phosphate
  modified_base 13: mod_base = OTHER; note = 2'-O-methyluridine-3'-phosphate
  modified_base 14: mod_base = OTHER; note = 2'-fluorocytidine-3'-phosphate
  modified_base 15: mod_base = OTHER; note = 2'-O-methylcytidine-3'-phosphate
  modified_base 16: mod_base = OTHER; note = 2'-fluorocytidine-3'-phosphate
  modified_base 17: mod_base = OTHER; note = 2'-O-methyluridine-3'-phosphate
  modified_base 18: mod_base = OTHER; note = 2'-O-methyluridine-3'-phosphate
  modified_base 19: mod_base = OTHER; note = 2'-O-methylcytidine-3'-phosphate
  modified_base 20: mod_base = OTHER; note = 2'-O-methylcytidine-3'-phosphate
  modified_base 21: mod_base = OTHER; note = 2'-O-methyladenosine-3'-phosphorothioate
  modified_base 22: mod_base = OTHER; note = 2'-O-methylcytidine-3'-phosphorothioate
  modified_base 23: mod_base = OTHER; note = 2'-O-methyladenosine-3'-phosphate
agacttccaccttcccttccaca

SEQ ID NO: 2824 - RNA, 21 nt, synthetic construct
  source 1..21: mol_type = other RNA; note = Description of Artificial Sequence: Synthetic oligonucleotide
  modified_base 1: mod_base = OTHER; note = 2'-O-methylguanosine-3'-phosphorothioate
  modified_base 2: mod_base = OTHER; note = 2'-O-methyluridine-3'-phosphorothioate
  modified_base 3: mod_base = OTHER; note = 2'-O-methylguanosine-3'-phosphate
  modified_base 4: mod_base = OTHER; note = 2'-O-methylguanosine-3'-phosphate
  modified_base 5: mod_base = OTHER; note = 2'-O-methyladenosine-3'-phosphate
  modified_base 6: mod_base = OTHER; note = 2'-O-methyladenosine-3'-phosphate
  modified_base 7: mod_base = OTHER; note = 2'-fluoroguanosine-3'-phosphate
  modified_base 8: mod_base = OTHER; note = 2'-O-methylguanosine-3'-phosphate
  modified_base 9: mod_base = OTHER; note = 2'-fluoroguanosine-3'-phosphate
  modified_base 10: mod_base = OTHER; note = 2'-fluoroadenosine-3'-phosphate
  modified_base 11: mod_base = OTHER; note = 2'-fluoroadenosine-3'-phosphate
  modified_base 12: mod_base = OTHER; note = 2'-O-methylguanosine-3'-phosphate
  modified_base 13: mod_base = OTHER; note = 2'-O-methylguanosine-3'-phosphate
  modified_base 14: mod_base = OTHER; note = 2'-O-methyluridine-3'-phosphate
  modified_base 15: mod_base = OTHER; note = 2'-O-methylguanosine-3'-phosphate
  modified_base 16: mod_base = OTHER; note = 2'-O-methylguanosine-3'-phosphate
  modified_base 17: mod_base = OTHER; note = 2'-O-methyladenosine-3'-phosphate
  modified_base 18: mod_base = OTHER; note = 2'-O-methyladenosine-3'-phosphate
  modified_base 19: mod_base = OTHER; note = 2'-O-methylguanosine-3'-phosphate
  modified_base 20: mod_base = OTHER; note = 2'-O-methyluridine-3'-phosphate
  modified_base 21: mod_base = OTHER; note = 2'-O-methylcytidine-3'-phosphate N-[tris(GalNAc-alkyl)-amidodecanoyl)]-4-hydroxyprolinol Hyp-(GalNAc-alkyl)3
gtggaagggaaggtggaagtc

SEQ ID NO: 2825 - RNA, 23 nt, synthetic construct
  source 1..23: mol_type = other RNA; note = Description of Artificial Sequence: Synthetic oligonucleotide
  modified_base 1: mod_base = OTHER; note = 2'-O-methylguanosine-3'-phosphorothioate
  modified_base 2: mod_base = OTHER; note = 2'-fluoroadenosine-3'-phosphorothioate
  modified_base 3: mod_base = OTHER; note = 2'-O-methylcytidine-3'-phosphate
  modified_base 4: mod_base = OTHER; note = 2'-O-methyluridine-3'-phosphate
  modified_base 5: mod_base = OTHER; note = 2'-O-methyluridine-3'-phosphate
  modified_base 6: mod_base = OTHER; note = 2'-fluorocytidine-3'-phosphate
  modified_base 7: mod_base = OTHER; note = 2'-O-methylcytidine-3'-phosphate
  modified_base 8: mod_base = OTHER; note = 2'-fluoroadenosine-3'-phosphate
  modified_base 9: mod_base = OTHER; note = 2'-fluorocytidine-3'-phosphate
  modified_base 10: mod_base = OTHER; note = 2'-O-methylcytidine-3'-phosphate
  modified_base 11: mod_base = OTHER; note = 2'-O-methyluridine-3'-phosphate
  modified_base 12: mod_base = OTHER; note = 2'-O-methyluridine-3'-phosphate
  modified_base 13: mod_base = OTHER; note = 2'-O-methylcytidine-3'-phosphate
  modified_base 14: mod_base = OTHER; note = 2'-fluorocytidine-3'-phosphate
  modified_base 15: mod_base = OTHER; note = 2'-O-methylcytidine-3'-phosphate
  modified_base 16: mod_base = OTHER; note = 2'-fluorouridine-3'-phosphate
  modified_base 17: mod_base = OTHER; note = 2'-O-methyluridine-3'-phosphate
  modified_base 18: mod_base = OTHER; note = 2'-O-methylcytidine-3'-phosphate
  modified_base 19: mod_base = OTHER; note = 2'-O-methylcytidine-3'-phosphate
  modified_base 20: mod_base = OTHER; note = 2'-O-methyladenosine-3'-phosphate
  modified_base 21: mod_base = OTHER; note = 2'-O-methylcytidine-3'-phosphorothioate
  modified_base 22: mod_base = OTHER; note = 2'-O-methyladenosine-3'-phosphorothioate
  modified_base 23: mod_base = OTHER; note = 2'-O-methylguanosine-3'-phosphate
gacttccaccttcccttccacag

SEQ ID NO: 2826 - RNA, 21 nt, synthetic construct
  source 1..21: mol_type = other RNA; note = Description of Artificial Sequence: Synthetic oligonucleotide
  modified_base 1: mod_base = OTHER; note = 2'-O-methylguanosine-3'-phosphorothioate
  modified_base 2: mod_base = OTHER; note = 2'-O-methylguanosine-3'-phosphorothioate
  modified_base 3: mod_base = OTHER; note = 2'-O-methylcytidine-3'-phosphate
  modified_base 4: mod_base = OTHER; note = 2'-O-methylguanosine-3'-phosphate
  modified_base 5: mod_base = OTHER; note = 2'-O-methyladenosine-3'-phosphate
  modified_base 6: mod_base = OTHER; note = 2'-O-methylguanosine-3'-phosphate
  modified_base 7: mod_base = OTHER; note = 2'-fluorocytidine-3'-phosphate
  modified_base 8: mod_base = OTHER; note = 2'-O-methyluridine-3'-phosphate
  modified_base 9: mod_base = OTHER; note = 2'-fluorouridine-3'-phosphate
  modified_base 10: mod_base = OTHER; note = 2'-fluoroguanosine-3'-phosphate
  modified_base 11: mod_base = OTHER; note = 2'-fluorocytidine-3'-phosphate
  modified_base 12: mod_base = OTHER; note = 2'-O-methylcytidine-3'-phosphate
  modified_base 13: mod_base = OTHER; note = 2'-O-methyladenosine-3'-phosphate
  modified_base 14: mod_base = OTHER; note = 2'-O-methylcytidine-3'-phosphate
  modified_base 15: mod_base = OTHER; note = 2'-O-methyluridine-3'-phosphate
  modified_base 16: mod_base = OTHER; note = 2'-O-methylguanosine-3'-phosphate
  modified_base 17: mod_base = OTHER; note = 2'-O-methyluridine-3'-phosphate
  modified_base 18: mod_base = OTHER; note = 2'-O-methylguanosine-3'-phosphate
  modified_base 19: mod_base = OTHER; note = 2'-O-methyladenosine-3'-phosphate
  modified_base 20: mod_base = OTHER; note = 2'-O-methylguanosine-3'-phosphate
  modified_base 21: mod_base = OTHER; note = 2'-O-methyladenosine-3'-phosphate N-[tris(GalNAc-alkyl)-amidodecanoyl)]-4-hydroxyprolinol Hyp-(GalNAc-alkyl)3
ggcgagcttgccactgtgaga

SEQ ID NO: 2827 - RNA, 23 nt, synthetic construct
  source 1..23: mol_type = other RNA; note = Description of Artificial Sequence: Synthetic oligonucleotide
  modified_base 1: mod_base = OTHER; note = 2'-O-methyluridine-3'-phosphorothioate
  modified_base 2: mod_base = OTHER; note = 2'-fluorocytidine-3'-phosphorothioate
  modified_base 3: mod_base = OTHER; note = 2'-O-methyluridine-3'-phosphate
  modified_base 4: mod_base = OTHER; note = 2'-O-methylcytidine-3'-phosphate
  modified_base 5: mod_base = OTHER; note = 2'-O-methyladenosine-3'-phosphate
  modified_base 6: mod_base = OTHER; note = 2'-fluorocytidine-3'-phosphate
  modified_base 7: mod_base = OTHER; note = 2'-O-methyladenosine-3'-phosphate
  modified_base 8: mod_base = OTHER; note = 2'-fluoroguanosine-3'-phosphate
  modified_base 9: mod_base = OTHER; note = 2'-fluorouridine-3'-phosphate
  modified_base 10: mod_base = OTHER; note = 2'-O-methylguanosine-3'-phosphate
  modified_base 11: mod_base = OTHER; note = 2'-O-methylguanosine-3'-phosphate
  modified_base 12: mod_base = OTHER; note = 2'-O-methylcytidine-3'-phosphate
  modified_base 13: mod_base = OTHER; note = 2'-O-methyladenosine-3'-phosphate
  modified_base 14: mod_base = OTHER; note = 2'-fluoroadenosine-3'-phosphate
  modified_base 15: mod_base = OTHER; note = 2'-O-methylguanosine-3'-phosphate
  modified_base 16: mod_base = OTHER; note = 2'-fluorocytidine-3'-phosphate
  modified_base 17: mod_base = OTHER; note = 2'-O-methyluridine-3'-phosphate
  modified_base 18: mod_base = OTHER; note = 2'-O-methylcytidine-3'-phosphate
  modified_base 19: mod_base = OTHER; note = 2'-O-methylguanosine-3'-phosphate
  modified_base 20: mod_base = OTHER; note = 2'-O-methylcytidine-3'-phosphate
  modified_base 21: mod_base = OTHER; note = 2'-O-methylcytidine-3'-phosphorothioate
  modified_base 22: mod_base = OTHER; note = 2'-O-methylguanosine-3'-phosphorothioate
  modified_base 23: mod_base = OTHER; note = 2'-O-methyluridine-3'-phosphate
tctcacagtggcaagctcgccgt

SEQ ID NO: 2828 - RNA, 21 nt, synthetic construct
  source 1..21: mol_type = other RNA; note = Description of Artificial Sequence: Synthetic oligonucleotide
  modified_base 1: mod_base = OTHER; note = 2'-O-methylguanosine-3'-phosphorothioate
  modified_base 2: mod_base = OTHER; note = 2'-O-methylcytidine-3'-phosphorothioate
  modified_base 3: mod_base = OTHER; note = 2'-O-methylguanosine-3'-phosphate
  modified_base 4: mod_base = OTHER; note = 2'-O-methyladenosine-3'-phosphate
  modified_base 5: mod_base = OTHER; note = 2'-O-methylguanosine-3'-phosphate
  modified_base 6: mod_base = OTHER; note = 2'-O-methylcytidine-3'-phosphate
  modified_base 7: mod_base = OTHER; note = 2'-fluorouridine-3'-phosphate
  modified_base 8: mod_base = OTHER; note = 2'-O-methyluridine-3'-phosphate
  modified_base 9: mod_base = OTHER; note = 2'-fluoroguanosine-3'-phosphate
  modified_base 10: mod_base = OTHER; note = 2'-fluorocytidine-3'-phosphate
  modified_base 11: mod_base = OTHER; note = 2'-fluorocytidine-3'-phosphate
  modified_base 12: mod_base = OTHER; note = 2'-O-methyladenosine-3'-phosphate
  modified_base 13: mod_base = OTHER; note = 2'-O-methylcytidine-3'-phosphate
  modified_base 14: mod_base = OTHER; note = 2'-O-methyluridine-3'-phosphate
  modified_base 15: mod_base = OTHER; note = 2'-O-methylguanosine-3'-phosphate
  modified_base 16: mod_base = OTHER; note = 2'-O-methyluridine-3'-phosphate
  modified_base 17: mod_base = OTHER; note = 2'-O-methylguanosine-3'-phosphate
  modified_base 18: mod_base = OTHER; note = 2'-O-methyladenosine-3'-phosphate
  modified_base 19: mod_base = OTHER; note = 2'-O-methylguanosine-3'-phosphate
  modified_base 20: mod_base = OTHER; note = 2'-O-methyladenosine-3'-phosphate
  modified_base 21: mod_base = OTHER; note = 2'-O-methylguanosine-3'-phosphate N-[tris(GalNAc-alkyl)-amidodecanoyl)]-4-hydroxyprolinol Hyp-(GalNAc-alkyl)3
gcgagcttgccactgtgagag

SEQ ID NO: 2829 - RNA, 23 nt, synthetic construct
  source 1..23: mol_type = other RNA; note = Description of Artificial Sequence: Synthetic oligonucleotide
  modified_base 1: mod_base = OTHER; note = 2'-O-methylcytidine-3'-phosphorothioate
  modified_base 2: mod_base = OTHER; note = 2'-fluorouridine -3'-phosphorothioate
  modified_base 3: mod_base = OTHER; note = 2'-O-methylcytidine-3'-phosphate
  modified_base 4: mod_base = OTHER; note = 2'-O-methyluridine-3'-phosphate
  modified_base 5: mod_base = OTHER; note = 2'-O-methylcytidine-3'-phosphate
  modified_base 6: mod_base = OTHER; note = 2'-fluoroadenosine-3'-phosphate
  modified_base 7: mod_base = OTHER; note = 2'-O-methylcytidine-3'-phosphate
  modified_base 8: mod_base = OTHER; note = 2'-fluoroadenosine-3'-phosphate
  modified_base 9: mod_base = OTHER; note = 2'-fluoroguanosine-3'-phosphate
  modified_base 10: mod_base = OTHER; note = 2'-O-methyluridine-3'-phosphate
  modified_base 11: mod_base = OTHER; note = 2'-O-methylguanosine-3'-phosphate
  modified_base 12: mod_base = OTHER; note = 2'-O-methylguanosine-3'-phosphate
  modified_base 13: mod_base = OTHER; note = 2'-O-methylcytidine-3'-phosphate
  modified_base 14: mod_base = OTHER; note = 2'-fluoroadenosine-3'-phosphate
  modified_base 15: mod_base = OTHER; note = 2'-O-methyladenosine-3'-phosphate
  modified_base 16: mod_base = OTHER; note = 2'-fluoroguanosine-3'-phosphate
  modified_base 17: mod_base = OTHER; note = 2'-O-methylcytidine-3'-phosphate
  modified_base 18: mod_base = OTHER; note = 2'-O-methyluridine-3'-phosphate
  modified_base 19: mod_base = OTHER; note = 2'-O-methylcytidine-3'-phosphate
  modified_base 20: mod_base = OTHER; note = 2'-O-methylguanosine-3'-phosphate
  modified_base 21: mod_base = OTHER; note = 2'-O-methylcytidine-3'-phosphorothioate
  modified_base 22: mod_base = OTHER; note = 2'-O-methylcytidine-3'-phosphorothioate
  modified_base 23: mod_base = OTHER; note = 2'-O-methylguanosine-3'-phosphate
ctctcacagtggcaagctcgccg

SEQ ID NO: 2830 - RNA, 21 nt, synthetic construct
  source 1..21: mol_type = other RNA; note = Description of Artificial Sequence: Synthetic oligonucleotide
  modified_base 1: mod_base = OTHER; note = 2'-O-methylguanosine-3'-phosphorothioate
  modified_base 2: mod_base = OTHER; note = 2'-O-methylguanosine-3'-phosphorothioate
  modified_base 3: mod_base = OTHER; note = 2'-O-methyladenosine-3'-phosphate
  modified_base 4: mod_base = OTHER; note = 2'-O-methylcytidine-3'-phosphate
  modified_base 5: mod_base = OTHER; note = 2'-O-methylguanosine-3'-phosphate
  modified_base 6: mod_base = OTHER; note = 2'-O-methylguanosine-3'-phosphate
  modified_base 7: mod_base = OTHER; note = 2'-fluorocytidine-3'-phosphate
  modified_base 8: mod_base = OTHER; note = 2'-O-methylguanosine-3'-phosphate
  modified_base 9: mod_base = OTHER; note = 2'-fluoroadenosine-3'-phosphate
  modified_base 10: mod_base = OTHER; note = 2'-fluoroguanosine-3'-phosphate
  modified_base 11: mod_base = OTHER; note = 2'-fluorocytidine-3'-phosphate
  modified_base 12: mod_base = OTHER; note = 2'-O-methyluridine-3'-phosphate
  modified_base 13: mod_base = OTHER; note = 2'-O-methyluridine-3'-phosphate
  modified_base 14: mod_base = OTHER; note = 2'-O-methylguanosine-3'-phosphate
  modified_base 15: mod_base = OTHER; note = 2'-O-methylcytidine-3'-phosphate
  modified_base 16: mod_base = OTHER; note = 2'-O-methylcytidine-3'-phosphate
  modified_base 17: mod_base = OTHER; note = 2'-O-methyladenosine-3'-phosphate
  modified_base 18: mod_base = OTHER; note = 2'-O-methylcytidine-3'-phosphate
  modified_base 19: mod_base = OTHER; note = 2'-O-methyluridine-3'-phosphate
  modified_base 20: mod_base = OTHER; note = 2'-O-methylguanosine-3'-phosphate
  modified_base 21: mod_base = OTHER; note = 2'-O-methyluridine-3'-phosphate N-[tris(GalNAc-alkyl)-amidodecanoyl)]-4-hydroxyprolinol Hyp-(GalNAc-alkyl)3
ggacggcgagcttgccactgt

SEQ ID NO: 2831 - RNA, 23 nt, synthetic construct
  source 1..23: mol_type = other RNA; note = Description of Artificial Sequence: Synthetic oligonucleotide
  modified_base 1: mod_base = OTHER; note = 2'-O-methyladenosine-3'-phosphorothioate
  modified_base 2: mod_base = OTHER; note = 2'-fluorocytidine-3'-phosphorothioate
  modified_base 3: mod_base = OTHER; note = 2'-O-methyladenosine-3'-phosphate
  modified_base 4: mod_base = OTHER; note = 2'-O-methylguanosine-3'-phosphate
  modified_base 5: mod_base = OTHER; note = 2'-O-methyluridine-3'-phosphate
  modified_base 6: mod_base = OTHER; note = 2'-fluoroguanosine-3'-phosphate
  modified_base 7: mod_base = OTHER; note = 2'-O-methylguanosine-3'-phosphate
  modified_base 8: mod_base = OTHER; note = 2'-fluorocytidine-3'-phosphate
  modified_base 9: mod_base = OTHER; note = 2'-fluoroadenosine-3'-phosphate
  modified_base 10: mod_base = OTHER; note = 2'-O-methyladenosine-3'-phosphate
  modified_base 11: mod_base = OTHER; note = 2'-O-methylguanosine-3'-phosphate
  modified_base 12: mod_base = OTHER; note = 2'-O-methylcytidine-3'-phosphate
  modified_base 13: mod_base = OTHER; note = 2'-O-methyluridine-3'-phosphate
  modified_base 14: mod_base = OTHER; note = 2'-fluorocytidine-3'-phosphate
  modified_base 15: mod_base = OTHER; note = 2'-O-methylguanosine-3'-phosphate
  modified_base 16: mod_base = OTHER; note = 2'-fluorocytidine-3'-phosphate
  modified_base 17: mod_base = OTHER; note = 2'-O-methylcytidine-3'-phosphate
  modified_base 18: mod_base = OTHER; note = 2'-O-methylguanosine-3'-phosphate
  modified_base 19: mod_base = OTHER; note = 2'-O-methyluridine-3'-phosphate
  modified_base 20: mod_base = OTHER; note = 2'-O-methylcytidine-3'-phosphate
  modified_base 21: mod_base = OTHER; note = 2'-O-methylcytidine-3'-phosphorothioate
  modified_base 22: mod_base = OTHER; note = 2'-O-methyladenosine-3'-phosphorothioate
  modified_base 23: mod_base = OTHER; note = 2'-O-methylcytidine-3'-phosphate
acagtggcaagctcgccgtccac

SEQ ID NO: 2832 - RNA, 21 nt, synthetic construct
  source 1..21: mol_type = other RNA; note = Description of Artificial Sequence: Synthetic oligonucleotide
  modified_base 1: mod_base = OTHER; note = 2'-O-methyluridine-3'-phosphorothioate
  modified_base 2: mod_base = OTHER; note = 2'-O-methylguanosine-3'-phosphorothioate
  modified_base 3: mod_base = OTHER; note = 2'-O-methylguanosine-3'-phosphate
  modified_base 4: mod_base = OTHER; note = 2'-O-methyladenosine-3'-phosphate
  modified_base 5: mod_base = OTHER; note = 2'-O-methylcytidine-3'-phosphate
  modified_base 6: mod_base = OTHER; note = 2'-O-methylguanosine-3'-phosphate
  modified_base 7: mod_base = OTHER; note = 2'-fluoroguanosine-3'-phosphate
  modified_base 8: mod_base = OTHER; note = 2'-O-methylcytidine-3'-phosphate
  modified_base 9: mod_base = OTHER; note = 2'-fluoroguanosine-3'-phosphate
  modified_base 10: mod_base = OTHER; note = 2'-fluoroadenosine-3'-phosphate
  modified_base 11: mod_base = OTHER; note = 2'-fluoroguanosine-3'-phosphate
  modified_base 12: mod_base = OTHER; note = 2'-O-methylcytidine-3'-phosphate
  modified_base 13: mod_base = OTHER; note = 2'-O-methyluridine-3'-phosphate
  modified_base 14: mod_base = OTHER; note = 2'-O-methyluridine-3'-phosphate
  modified_base 15: mod_base = OTHER; note = 2'-O-methylguanosine-3'-phosphate
  modified_base 16: mod_base = OTHER; note = 2'-O-methylcytidine-3'-phosphate
  modified_base 17: mod_base = OTHER; note = 2'-O-methylcytidine-3'-phosphate
  modified_base 18: mod_base = OTHER; note = 2'-O-methyladenosine-3'-phosphate
  modified_base 19: mod_base = OTHER; note = 2'-O-methylcytidine-3'-phosphate
  modified_base 20: mod_base = OTHER; note = 2'-O-methyluridine-3'-phosphate
  modified_base 21: mod_base = OTHER; note = 2'-O-methylguanosine-3'-phosphate N-[tris(GalNAc-alkyl)-amidodecanoyl)]-4-hydroxyprolinol Hyp-(GalNAc-alkyl)3
tggacggcgagcttgccactg

SEQ ID NO: 2833 - RNA, 23 nt, synthetic construct
  source 1..23: mol_type = other RNA; note = Description of Artificial Sequence: Synthetic oligonucleotide
  modified_base 1: mod_base = OTHER; note = 2'-O-methylcytidine-3'-phosphorothioate
  modified_base 2: mod_base = OTHER; note = 2'-fluoroadenosine-3'-phosphorothioate
  modified_base 3: mod_base = OTHER; note = 2'-O-methylguanosine-3'-phosphate
  modified_base 4: mod_base = OTHER; note = 2'-O-methyluridine-3'-phosphate
  modified_base 5: mod_base = OTHER; note = 2'-O-methylguanosine-3'-phosphate
  modified_base 6: mod_base = OTHER; note = 2'-fluoroguanosine-3'-phosphate
  modified_base 7: mod_base = OTHER; note = 2'-O-methylcytidine-3'-phosphate
  modified_base 8: mod_base = OTHER; note = 2'-fluoroadenosine-3'-phosphate
  modified_base 9: mod_base = OTHER; note = 2'-fluoroadenosine-3'-phosphate
  modified_base 10: mod_base = OTHER; note = 2'-O-methylguanosine-3'-phosphate
  modified_base 11: mod_base = OTHER; note = 2'-O-methylcytidine-3'-phosphate
  modified_base 12: mod_base = OTHER; note = 2'-O-methyluridine-3'-phosphate
  modified_base 13: mod_base = OTHER; note = 2'-O-methylcytidine-3'-phosphate
  modified_base 14: mod_base = OTHER; note = 2'-fluoroguanosine-3'-phosphate
  modified_base 15: mod_base = OTHER; note = 2'-O-methylcytidine-3'-phosphate
  modified_base 16: mod_base = OTHER; note = 2'-fluorocytidine-3'-phosphate
  modified_base 17: mod_base = OTHER; note = 2'-O-methylguanosine-3'-phosphate
  modified_base 18: mod_base = OTHER; note = 2'-O-methyluridine-3'-phosphate
  modified_base 19: mod_base = OTHER; note = 2'-O-methylcytidine-3'-phosphate
  modified_base 20: mod_base = OTHER; note = 2'-O-methylcytidine-3'-phosphate
  modified_base 21: mod_base = OTHER; note = 2'-O-methyladenosine-3'-phosphorothioate
  modified_base 22: mod_base = OTHER; note = 2'-O-methylcytidine-3'-phosphorothioate
  modified_base 23: mod_base = OTHER; note = 2'-O-methyladenosine-3'-phosphate
cagtggcaagctcgccgtccaca

SEQ ID NO: 2834 - RNA, 21 nt, synthetic construct
  source 1..21: mol_type = other RNA; note = Description of Artificial Sequence: Synthetic oligonucleotide
  modified_base 1: mod_base = OTHER; note = 2'-O-methyladenosine-3'-phosphorothioate
  modified_base 2: mod_base = OTHER; note = 2'-O-methyluridine-3'-phosphorothioate
  modified_base 3: mod_base = OTHER; note = 2'-O-methylguanosine-3'-phosphate
  modified_base 4: mod_base = OTHER; note = 2'-O-methyluridine-3'-phosphate
  modified_base 5: mod_base = OTHER; note = 2'-O-methylguanosine-3'-phosphate
  modified_base 6: mod_base = OTHER; note = 2'-O-methylcytidine-3'-phosphate
  modified_base 7: mod_base = OTHER; note = 2'-fluoroguanosine-3'-phosphate
  modified_base 8: mod_base = OTHER; note = 2'-O-methyluridine-3'-phosphate
  modified_base 9: mod_base = OTHER; note = 2'-fluoroadenosine-3'-phosphate
  modified_base 10: mod_base = OTHER; note = 2'-fluoroadenosine-3'-phosphate
  modified_base 11: mod_base = OTHER; note = 2'-fluorocytidine-3'-phosphate
  modified_base 12: mod_base = OTHER; note = 2'-O-methyladenosine-3'-phosphate
  modified_base 13: mod_base = OTHER; note = 2'-O-methylguanosine-3'-phosphate
  modified_base 14: mod_base = OTHER; note = 2'-O-methyladenosine-3'-phosphate
  modified_base 15: mod_base = OTHER; note = 2'-O-methyluridine-3'-phosphate
  modified_base 16: mod_base = OTHER; note = 2'-O-methyluridine-3'-phosphate
  modified_base 17: mod_base = OTHER; note = 2'-O-methylcytidine-3'-phosphate
  modified_base 18: mod_base = OTHER; note = 2'-O-methyladenosine-3'-phosphate
  modified_base 19: mod_base = OTHER; note = 2'-O-methyladenosine-3'-phosphate
  modified_base 20: mod_base = OTHER; note = 2'-O-methyladenosine-3'-phosphate
  modified_base 21: mod_base = OTHER; note = 2'-O-methylcytidine-3'-phosphate N-[tris(GalNAc-alkyl)-amidodecanoyl)]-4-hydroxyprolinol Hyp-(GalNAc-alkyl)3
atgtgcgtaacagattcaaac

SEQ ID NO: 2835 - RNA, 23 nt, synthetic construct
  source 1..23: mol_type = other RNA; note = Description of Artificial Sequence: Synthetic oligonucleotide
  modified_base 1: mod_base = OTHER; note = 2'-O-methylguanosine-3'-phosphorothioate
  modified_base 2: mod_base = OTHER; note = 2'-fluorouridine -3'-phosphorothioate
  modified_base 3: mod_base = OTHER; note = 2'-O-methyluridine-3'-phosphate
  modified_base 4: mod_base = OTHER; note = 2'-O-methyluridine-3'-phosphate
  modified_base 5: mod_base = OTHER; note = 2'-O-methylguanosine-3'-phosphate
  modified_base 6: mod_base = OTHER; note = 2'-fluoroadenosine-3'-phosphate
  modified_base 7: mod_base = OTHER; note = 2'-O-methyladenosine-3'-phosphate
  modified_base 8: mod_base = OTHER; note = 2'-fluorouridine-3'-phosphate
  modified_base 9: mod_base = OTHER; note = 2'-fluorocytidine-3'-phosphate
  modified_base 10: mod_base = OTHER; note = 2'-O-methyluridine-3'-phosphate
  modified_base 11: mod_base = OTHER; note = 2'-O-methylguanosine-3'-phosphate
  modified_base 12: mod_base = OTHER; note = 2'-O-methyluridine-3'-phosphate
  modified_base 13: mod_base = OTHER; note = 2'-O-methyluridine-3'-phosphate
  modified_base 14: mod_base = OTHER; note = 2'-fluoroadenosine-3'-phosphate
  modified_base 15: mod_base = OTHER; note = 2'-O-methylcytidine-3'-phosphate
  modified_base 16: mod_base = OTHER; note = 2'-fluoroguanosine-3'-phosphate
  modified_base 17: mod_base = OTHER; note = 2'-O-methylcytidine-3'-phosphate
  modified_base 18: mod_base = OTHER; note = 2'-O-methyladenosine-3'-phosphate
  modified_base 19: mod_base = OTHER; note = 2'-O-methylcytidine-3'-phosphate
  modified_base 20: mod_base = OTHER; note = 2'-O-methyladenosine-3'-phosphate
  modified_base 21: mod_base = OTHER; note = 2'-O-methyluridine-3'-phosphorothioate
  modified_base 22: mod_base = OTHER; note = 2'-O-methylcytidine-3'-phosphorothioate
  modified_base 23: mod_base = OTHER; note = 2'-O-methyladenosine-3'-phosphate
gtttgaatctgttacgcacatca

SEQ ID NO: 2836 - RNA, 21 nt, synthetic construct
  source 1..21: mol_type = other RNA; note = Description of Artificial Sequence: Synthetic oligonucleotide
  modified_base 1: mod_base = OTHER; note = 2'-O-methyluridine-3'-phosphorothioate
  modified_base 2: mod_base = OTHER; note = 2'-O-methylguanosine-3'-phosphorothioate
  modified_base 3: mod_base = OTHER; note = 2'-O-methyluridine-3'-phosphate
  modified_base 4: mod_base = OTHER; note = 2'-O-methylguanosine-3'-phosphate
  modified_base 5: mod_base = OTHER; note = 2'-O-methylcytidine-3'-phosphate
  modified_base 6: mod_base = OTHER; note = 2'-O-methylguanosine-3'-phosphate
  modified_base 7: mod_base = OTHER; note = 2'-fluorouridine-3'-phosphate
  modified_base 8: mod_base = OTHER; note = 2'-O-methyladenosine-3'-phosphate
  modified_base 9: mod_base = OTHER; note = 2'-fluoroadenosine-3'-phosphate
  modified_base 10: mod_base = OTHER; note = 2'-fluorocytidine-3'-phosphate
  modified_base 11: mod_base = OTHER; note = 2'-fluoroadenosine-3'-phosphate
  modified_base 12: mod_base = OTHER; note = 2'-O-methylguanosine-3'-phosphate
  modified_base 13: mod_base = OTHER; note = 2'-O-methyladenosine-3'-phosphate
  modified_base 14: mod_base = OTHER; note = 2'-O-methyluridine-3'-phosphate
  modified_base 15: mod_base = OTHER; note = 2'-O-methyluridine-3'-phosphate
  modified_base 16: mod_base = OTHER; note = 2'-O-methylcytidine-3'-phosphate
  modified_base 17: mod_base = OTHER; note = 2'-O-methyladenosine-3'-phosphate
  modified_base 18: mod_base = OTHER; note = 2'-O-methyladenosine-3'-phosphate
  modified_base 19: mod_base = OTHER; note = 2'-O-methyladenosine-3'-phosphate
  modified_base 20: mod_base = OTHER; note = 2'-O-methylcytidine-3'-phosphate
  modified_base 21: mod_base = OTHER; note = 2'-O-methyluridine-3'-phosphate N-[tris(GalNAc-alkyl)-amidodecanoyl)]-4-hydroxyprolinol Hyp-(GalNAc-alkyl)3
tgtgcgtaacagattcaaact

SEQ ID NO: 2837 - RNA, 23 nt, synthetic construct
  source 1..23: mol_type = other RNA; note = Description of Artificial Sequence: Synthetic oligonucleotide
  modified_base 1: mod_base = OTHER; note = 2'-O-methyladenosine-3'-phosphorothioate
  modified_base 2: mod_base = OTHER; note = 2'-fluoroguanosine-3'-phosphorothioate
  modified_base 3: mod_base = OTHER; note = 2'-O-methyluridine-3'-phosphate
  modified_base 4: mod_base = OTHER; note = 2'-O-methyluridine-3'-phosphate
  modified_base 5: mod_base = OTHER; note = 2'-O-methyluridine-3'-phosphate
  modified_base 6: mod_base = OTHER; note = 2'-fluoroguanosine-3'-phosphate
  modified_base 7: mod_base = OTHER; note = 2'-O-methyladenosine-3'-phosphate
  modified_base 8: mod_base = OTHER; note = 2'-fluoroadenosine-3'-phosphate
  modified_base 9: mod_base = OTHER; note = 2'-fluorouridine-3'-phosphate
  modified_base 10: mod_base = OTHER; note = 2'-O-methylcytidine-3'-phosphate
  modified_base 11: mod_base = OTHER; note = 2'-O-methyluridine-3'-phosphate
  modified_base 12: mod_base = OTHER; note = 2'-O-methylguanosine-3'-phosphate
  modified_base 13: mod_base = OTHER; note = 2'-O-methyluridine-3'-phosphate
  modified_base 14: mod_base = OTHER; note = 2'-fluorouridine-3'-phosphate
  modified_base 15: mod_base = OTHER; note = 2'-O-methyladenosine-3'-phosphate
  modified_base 16: mod_base = OTHER; note = 2'-fluorocytidine-3'-phosphate
  modified_base 17: mod_base = OTHER; note = 2'-O-methylguanosine-3'-phosphate
  modified_base 18: mod_base = OTHER; note = 2'-O-methylcytidine-3'-phosphate
  modified_base 19: mod_base = OTHER; note = 2'-O-methyladenosine-3'-phosphate
  modified_base 20: mod_base = OTHER; note = 2'-O-methylcytidine-3'-phosphate
  modified_base 21: mod_base = OTHER; note = 2'-O-methyladenosine-3'-phosphorothioate
  modified_base 22: mod_base = OTHER; note = 2'-O-methyluridine-3'-phosphorothioate
  modified_base 23: mod_base = OTHER; note = 2'-O-methylcytidine-3'-phosphate
agtttgaatctgttacgcacatc

SEQ ID NO: 2838 - RNA, 21 nt, synthetic construct
  source 1..21: mol_type = other RNA; note = Description of Artificial Sequence: Synthetic oligonucleotide
  modified_base 1: mod_base = OTHER; note = 2'-O-methylguanosine-3'-phosphorothioate
  modified_base 2: mod_base = OTHER; note = 2'-O-methyladenosine-3'-phosphorothioate
  modified_base 3: mod_base = OTHER; note = 2'-O-methyluridine-3'-phosphate
  modified_base 4: mod_base = OTHER; note = 2'-O-methylguanosine-3'-phosphate
  modified_base 5: mod_base = OTHER; note = 2'-O-methyladenosine-3'-phosphate
  modified_base 6: mod_base = OTHER; note = 2'-O-methyluridine-3'-phosphate
  modified_base 7: mod_base = OTHER; note = 2'-fluoroguanosine-3'-phosphate
  modified_base 8: mod_base = OTHER; note = 2'-O-methyluridine-3'-phosphate
  modified_base 9: mod_base = OTHER; note = 2'-fluoroguanosine-3'-phosphate
  modified_base 10: mod_base = OTHER; note = 2'-fluorocytidine-3'-phosphate
  modified_base 11: mod_base = OTHER; note = 2'-fluoroguanosine-3'-phosphate
  modified_base 12: mod_base = OTHER; note = 2'-O-methyluridine-3'-phosphate
  modified_base 13: mod_base = OTHER; note = 2'-O-methyladenosine-3'-phosphate
  modified_base 14: mod_base = OTHER; note = 2'-O-methyladenosine-3'-phosphate
  modified_base 15: mod_base = OTHER; note = 2'-O-methylcytidine-3'-phosphate
  modified_base 16: mod_base = OTHER; note = 2'-O-methyladenosine-3'-phosphate
  modified_base 17: mod_base = OTHER; note = 2'-O-methylguanosine-3'-phosphate
  modified_base 18: mod_base = OTHER; note = 2'-O-methyladenosine-3'-phosphate
  modified_base 19: mod_base = OTHER; note = 2'-O-methyluridine-3'-phosphate
  modified_base 20: mod_base = OTHER; note = 2'-O-methyluridine-3'-phosphate
  modified_base 21: mod_base = OTHER; note = 2'-O-methylcytidine-3'-phosphate N-[tris(GalNAc-alkyl)-amidodecanoyl)]-4-hydroxyprolinol Hyp-(GalNAc-alkyl)3
gatgatgtgcgtaacagattc

SEQ ID NO: 2839 - RNA, 23 nt, synthetic construct
  source 1..23: mol_type = other RNA; note = Description of Artificial Sequence: Synthetic oligonucleotide
  modified_base 1: mod_base = OTHER; note = 2'-O-methylguanosine-3'-phosphorothioate
  modified_base 2: mod_base = OTHER; note = 2'-fluoroadenosine-3'-phosphorothioate
  modified_base 3: mod_base = OTHER; note = 2'-O-methyladenosine-3'-phosphate
  modified_base 4: mod_base = OTHER; note = 2'-O-methyluridine-3'-phosphate
  modified_base 5: mod_base = OTHER; note = 2'-O-methylcytidine-3'-phosphate
  modified_base 6: mod_base = OTHER; note = 2'-fluorouridine-3'-phosphate
  modified_base 7: mod_base = OTHER; note = 2'-O-methylguanosine-3'-phosphate
  modified_base 8: mod_base = OTHER; note = 2'-fluorouridine-3'-phosphate
  modified_base 9: mod_base = OTHER; note = 2'-fluorouridine-3'-phosphate
  modified_base 10: mod_base = OTHER; note = 2'-O-methyladenosine-3'-phosphate
  modified_base 11: mod_base = OTHER; note = 2'-O-methylcytidine-3'-phosphate
  modified_base 12: mod_base = OTHER; note = 2'-O-methylguanosine-3'-phosphate
  modified_base 13: mod_base = OTHER; note = 2'-O-methylcytidine-3'-phosphate
  modified_base 14: mod_base = OTHER; note = 2'-fluoroadenosine-3'-phosphate
  modified_base 15: mod_base = OTHER; note = 2'-O-methylcytidine-3'-phosphate
  modified_base 16: mod_base = OTHER; note = 2'-fluoroadenosine-3'-phosphate
  modified_base 17: mod_base = OTHER; note = 2'-O-methyluridine-3'-phosphate
  modified_base 18: mod_base = OTHER; note = 2'-O-methylcytidine-3'-phosphate
  modified_base 19: mod_base = OTHER; note = 2'-O-methyladenosine-3'-phosphate
  modified_base 20: mod_base = OTHER; note = 2'-O-methyluridine-3'-phosphate
  modified_base 21: mod_base = OTHER; note = 2'-O-methylcytidine-3'-phosphorothioate
  modified_base 22: mod_base = OTHER; note = 2'-O-methylcytidine-3'-phosphorothioate
  modified_base 23: mod_base = OTHER; note = 2'-O-methyladenosine-3'-phosphate
gaatctgttacgcacatcatcca

SEQ ID NO: 2840 - RNA, 21 nt, synthetic construct
  source 1..21: mol_type = other RNA; note = Description of Artificial Sequence: Synthetic oligonucleotide
  modified_base 1: mod_base = OTHER; note = 2'-O-methylguanosine-3'-phosphorothioate
  modified_base 2: mod_base = OTHER; note = 2'-O-methylguanosine-3'-phosphorothioate
  modified_base 3: mod_base = OTHER; note = 2'-O-methyladenosine-3'-phosphate
  modified_base 4: mod_base = OTHER; note = 2'-O-methyluridine-3'-phosphate
  modified_base 5: mod_base = OTHER; note = 2'-O-methylguanosine-3'-phosphate
  modified_base 6: mod_base = OTHER; note = 2'-O-methyladenosine-3'-phosphate
  modified_base 7: mod_base = OTHER; note = 2'-fluorouridine-3'-phosphate
  modified_base 8: mod_base = OTHER; note = 2'-O-methylguanosine-3'-phosphate
  modified_base 9: mod_base = OTHER; note = 2'-fluorouridine-3'-phosphate
  modified_base 10: mod_base = OTHER; note = 2'-fluoroguanosine-3'-phosphate
  modified_base 11: mod_base = OTHER; note = 2'-fluorocytidine-3'-phosphate
  modified_base 12: mod_base = OTHER; note = 2'-O-methylguanosine-3'-phosphate
  modified_base 13: mod_base = OTHER; note = 2'-O-methyluridine-3'-phosphate
  modified_base 14: mod_base = OTHER; note = 2'-O-methyladenosine-3'-phosphate
  modified_base 15: mod_base = OTHER; note = 2'-O-methyladenosine-3'-phosphate
  modified_base 16: mod_base = OTHER; note = 2'-O-methylcytidine-3'-phosphate
  modified_base 17: mod_base = OTHER; note = 2'-O-methyladenosine-3'-phosphate
  modified_base 18: mod_base = OTHER; note = 2'-O-methylguanosine-3'-phosphate
  modified_base 19: mod_base = OTHER; note = 2'-O-methyladenosine-3'-phosphate
  modified_base 20: mod_base = OTHER; note = 2'-O-methyluridine-3'-phosphate
  modified_base 21: mod_base = OTHER; note = 2'-O-methyluridine-3'-phosphate N-[tris(GalNAc-alkyl)-amidodecanoyl)]-4-hydroxyprolinol Hyp-(GalNAc-alkyl)3
ggatgatgtgcgtaacagatt

SEQ ID NO: 2841 - RNA, 23 nt, synthetic construct
  source 1..23: mol_type = other RNA; note = Description of Artificial Sequence: Synthetic oligonucleotide
  modified_base 1: mod_base = OTHER; note = 2'-O-methyladenosine-3'-phosphorothioate
  modified_base 2: mod_base = OTHER; note = 2'-fluoroadenosine-3'-phosphorothioate
  modified_base 3: mod_base = OTHER; note = 2'-O-methyluridine-3'-phosphate
  modified_base 4: mod_base = OTHER; note = 2'-O-methylcytidine-3'-phosphate
  modified_base 5: mod_base = OTHER; note = 2'-O-methyluridine-3'-phosphate
  modified_base 6: mod_base = OTHER; note = 2'-fluoroguanosine-3'-phosphate
  modified_base 7: mod_base = OTHER; note = 2'-O-methyluridine-3'-phosphate
  modified_base 8: mod_base = OTHER; note = 2'-fluorouridine-3'-phosphate
  modified_base 9: mod_base = OTHER; note = 2'-fluoroadenosine-3'-phosphate
  modified_base 10: mod_base = OTHER; note = 2'-O-methylcytidine-3'-phosphate
  modified_base 11: mod_base = OTHER; note = 2'-O-methylguanosine-3'-phosphate
  modified_base 12: mod_base = OTHER; note = 2'-O-methylcytidine-3'-phosphate
  modified_base 13: mod_base = OTHER; note = 2'-O-methyladenosine-3'-phosphate
  modified_base 14: mod_base = OTHER; note = 2'-fluorocytidine-3'-phosphate
  modified_base 15: mod_base = OTHER; note = 2'-O-methyladenosine-3'-phosphate
  modified_base 16: mod_base = OTHER; note = 2'-fluorouridine-3'-phosphate
  modified_base 17: mod_base = OTHER; note = 2'-O-methylcytidine-3'-phosphate
  modified_base 18: mod_base = OTHER; note = 2'-O-methyladenosine-3'-phosphate
  modified_base 19: mod_base = OTHER; note = 2'-O-methyluridine-3'-phosphate
  modified_base 20: mod_base = OTHER; note = 2'-O-methylcytidine-3'-phosphate
  modified_base 21: mod_base = OTHER; note = 2'-O-methylcytidine-3'-phosphorothioate
  modified_base 22: mod_base = OTHER; note = 2'-O-methyladenosine-3'-phosphorothioate
  modified_base 23: mod_base = OTHER; note = 2'-O-methylguanosine-3'-phosphate
aatctgttacgcacatcatccag

SEQ ID NO: 2842 - RNA, 21 nt, synthetic construct
  source 1..21: mol_type = other RNA; note = Description of Artificial Sequence: Synthetic oligonucleotide
  modified_base 1: mod_base = OTHER; note = 2'-O-methylguanosine-3'-phosphorothioate
  modified_base 2: mod_base = OTHER; note = 2'-O-methylguanosine-3'-phosphorothioate
  modified_base 3: mod_base = OTHER; note = 2'-O-methylguanosine-3'-phosphate
  modified_base 4: mod_base = OTHER; note = 2'-O-methyluridine-3'-phosphate
  modified_base 5: mod_base = OTHER; note = 2'-O-methylcytidine-3'-phosphate
  modified_base 6: mod_base = OTHER; note = 2'-O-methyladenosine-3'-phosphate
  modified_base 7: mod_base = OTHER; note = 2'-fluoroguanosine-3'-phosphate
  modified_base 8: mod_base = OTHER; note = 2'-O-methylcytidine-3'-phosphate
  modified_base 9: mod_base = OTHER; note = 2'-fluoroadenosine-3'-phosphate
  modified_base 10: mod_base = OTHER; note = 2'-fluorouridine-3'-phosphate
  modified_base 11: mod_base = OTHER; note = 2'-fluoroguanosine-3'-phosphate
  modified_base 12: mod_base = OTHER; note = 2'-O-methylcytidine-3'-phosphate
  modified_base 13: mod_base = OTHER; note = 2'-O-methylcytidine-3'-phosphate
  modified_base 14: mod_base = OTHER; note = 2'-O-methyladenosine-3'-phosphate
  modified_base 15: mod_base = OTHER; note = 2'-O-methyladenosine-3'-phosphate
  modified_base 16: mod_base = OTHER; note = 2'-O-methyluridine-3'-phosphate
  modified_base 17: mod_base = OTHER; note = 2'-O-methyladenosine-3'-phosphate
  modified_base 18: mod_base = OTHER; note = 2'-O-methyluridine-3'-phosphate
  modified_base 19: mod_base = OTHER; note = 2'-O-methylguanosine-3'-phosphate
  modified_base 20: mod_base = OTHER; note = 2'-O-methyluridine-3'-phosphate
  modified_base 21: mod_base = OTHER; note = 2'-O-methylguanosine-3'-phosphate N-[tris(GalNAc-alkyl)-amidodecanoyl)]-4-hydroxyprolinol Hyp-(GalNAc-alkyl)3
gggtcagcatgccaatatgtg

SEQ ID NO: 2843 - RNA, 23 nt, synthetic construct
  source 1..23: mol_type = other RNA; note = Description of Artificial Sequence: Synthetic oligonucleotide
  modified_base 1: mod_base = OTHER; note = 2'-O-methylcytidine-3'-phosphorothioate
  modified_base 2: mod_base = OTHER; note = 2'-fluoroadenosine-3'-phosphorothioate
  modified_base 3: mod_base = OTHER; note = 2'-O-methylcytidine-3'-phosphate
  modified_base 4: mod_base = OTHER; note = 2'-O-methyladenosine-3'-phosphate
  modified_base 5: mod_base = OTHER; note = 2'-O-methyluridine-3'-phosphate
  modified_base 6: mod_base = OTHER; note = 2'-fluoroadenosine-3'-phosphate
  modified_base 7: mod_base = OTHER; note = 2'-O-methyluridine-3'-phosphate
  modified_base 8: mod_base = OTHER; note = 2'-fluorouridine-3'-phosphate
  modified_base 9: mod_base = OTHER; note = 2'-fluoroguanosine-3'-phosphate
  modified_base 10: mod_base = OTHER; note = 2'-O-methylguanosine-3'-phosphate
  modified_base 11: mod_base = OTHER; note = 2'-O-methylcytidine-3'-phosphate
  modified_base 12: mod_base = OTHER; note = 2'-O-methyladenosine-3'-phosphate
  modified_base 13: mod_base = OTHER; note = 2'-O-methyluridine-3'-phosphate
  modified_base 14: mod_base = OTHER; note = 2'-fluoroguanosine-3'-phosphate
  modified_base 15: mod_base = OTHER; note = 2'-O-methylcytidine-3'-phosphate
  modified_base 16: mod_base = OTHER; note = 2'-fluorouridine-3'-phosphate
  modified_base 17: mod_base = OTHER; note = 2'-O-methylguanosine-3'-phosphate
  modified_base 18: mod_base = OTHER; note = 2'-O-methyladenosine-3'-phosphate
  modified_base 19: mod_base = OTHER; note = 2'-O-methylcytidine-3'-phosphate
  modified_base 20: mod_base = OTHER; note = 2'-O-methylcytidine-3'-phosphate
  modified_base 21: mod_base = OTHER; note = 2'-O-methylcytidine-3'-phosphorothioate
  modified_base 22: mod_base = OTHER; note = 2'-O-methyluridine-3'-phosphorothioate
  modified_base 23: mod_base = OTHER; note = 2'-O-methylcytidine-3'-phosphate
cacatattggcatgctgaccctc

SEQ ID NO: 2844 - RNA, 21 nt, synthetic construct
  source 1..21: mol_type = other RNA; note = Description of Artificial Sequence: Synthetic oligonucleotide
  modified_base 1: mod_base = OTHER; note = 2'-O-methylguanosine-3'-phosphorothioate
  modified_base 2: mod_base = OTHER; note = 2'-O-methylguanosine-3'-phosphorothioate
  modified_base 3: mod_base = OTHER; note = 2'-O-methyluridine-3'-phosphate
  modified_base 4: mod_base = OTHER; note = 2'-O-methylcytidine-3'-phosphate
  modified_base 5: mod_base = OTHER; note = 2'-O-methyladenosine-3'-phosphate
  modified_base 6: mod_base = OTHER; note = 2'-O-methylguanosine-3'-phosphate
  modified_base 7: mod_base = OTHER; note = 2'-fluorocytidine-3'-phosphate
  modified_base 8: mod_base = OTHER; note = 2'-O-methyladenosine-3'-phosphate
  modified_base 9: mod_base = OTHER; note = 2'-fluorouridine-3'-phosphate
  modified_base 10: mod_base = OTHER; note = 2'-fluoroguanosine-3'-phosphate
  modified_base 11: mod_base = OTHER; note = 2'-fluorocytidine-3'-phosphate
  modified_base 12: mod_base = OTHER; note = 2'-O-methylcytidine-3'-phosphate
  modified_base 13: mod_base = OTHER; note = 2'-O-methyladenosine-3'-phosphate
  modified_base 14: mod_base = OTHER; note = 2'-O-methyladenosine-3'-phosphate
  modified_base 15: mod_base = OTHER; note = 2'-O-methyluridine-3'-phosphate
  modified_base 16: mod_base = OTHER; note = 2'-O-methyladenosine-3'-phosphate
  modified_base 17: mod_base = OTHER; note = 2'-O-methyluridine-3'-phosphate
  modified_base 18: mod_base = OTHER; note = 2'-O-methylguanosine-3'-phosphate
  modified_base 19: mod_base = OTHER; note = 2'-O-methyluridine-3'-phosphate
  modified_base 20: mod_base = OTHER; note = 2'-O-methylguanosine-3'-phosphate
  modified_base 21: mod_base = OTHER; note = 2'-O-methyluridine-3'-phosphate N-[tris(GalNAc-alkyl)-amidodecanoyl)]-4-hydroxyprolinol Hyp-(GalNAc-alkyl)3
ggtcagcatgccaatatgtgt

SEQ ID NO: 2845 - RNA, 23 nt, synthetic construct
  source 1..23: mol_type = other RNA; note = Description of Artificial Sequence: Synthetic oligonucleotide
  modified_base 1: mod_base = OTHER; note = 2'-O-methyladenosine-3'-phosphorothioate
  modified_base 2: mod_base = OTHER; note = 2'-fluorocytidine-3'-phosphorothioate
  modified_base 3: mod_base = OTHER; note = 2'-O-methyladenosine-3'-phosphate
  modified_base 4: mod_base = OTHER; note = 2'-O-methylcytidine-3'-phosphate
  modified_base 5: mod_base = OTHER; note = 2'-O-methyladenosine-3'-phosphate
  modified_base 6: mod_base = OTHER; note = 2'-fluorouridine-3'-phosphate
  modified_base 7: mod_base = OTHER; note = 2'-O-methyladenosine-3'-phosphate
  modified_base 8: mod_base = OTHER; note = 2'-fluorouridine-3'-phosphate
  modified_base 9: mod_base = OTHER; note = 2'-fluorouridine-3'-phosphate
  modified_base 10: mod_base = OTHER; note = 2'-O-methylguanosine-3'-phosphate
  modified_base 11: mod_base = OTHER; note = 2'-O-methylguanosine-3'-phosphate
  modified_base 12: mod_base = OTHER; note = 2'-O-methylcytidine-3'-phosphate
  modified_base 13: mod_base = OTHER; note = 2'-O-methyladenosine-3'-phosphate
  modified_base 14: mod_base = OTHER; note = 2'-fluorouridine-3'-phosphate
  modified_base 15: mod_base = OTHER; note = 2'-O-methylguanosine-3'-phosphate
  modified_base 16: mod_base = OTHER; note = 2'-fluorocytidine-3'-phosphate
  modified_base 17: mod_base = OTHER; note = 2'-O-methyluridine-3'-phosphate
  modified_base 18: mod_base = OTHER; note = 2'-O-methylguanosine-3'-phosphate
  modified_base 19: mod_base = OTHER; note = 2'-O-methyladenosine-3'-phosphate
  modified_base 20: mod_base = OTHER; note = 2'-O-methylcytidine-3'-phosphate
  modified_base 21: mod_base = OTHER; note = 2'-O-methylcytidine-3'-phosphorothioate
  modified_base 22: mod_base = OTHER; note = 2'-O-methylcytidine-3'-phosphorothioate
  modified_base 23: mod_base = OTHER; note = 2'-O-methyluridine-3'-phosphate
acacatattggcatgctgaccct

SEQ ID NO: 2846 - RNA, 21 nt, synthetic construct
  source 1..21: mol_type = other RNA; note = Description of Artificial Sequence: Synthetic oligonucleotide
  modified_base 1: mod_base = OTHER; note = 2'-O-methylcytidine-3'-phosphorothioate
  modified_base 2: mod_base = OTHER; note = 2'-O-methyladenosine-3'-phosphorothioate
  modified_base 3: mod_base = OTHER; note = 2'-O-methylguanosine-3'-phosphate
  modified_base 4: mod_base = OTHER; note = 2'-O-methyladenosine-3'-phosphate
  modified_base 5: mod_base = OTHER; note = 2'-O-methylguanosine-3'-phosphate
  modified_base 6: mod_base = OTHER; note = 2'-O-methylguanosine-3'-phosphate
  modified_base 7: mod_base = OTHER; note = 2'-fluoroguanosine-3'-phosphate
  modified_base 8: mod_base = OTHER; note = 2'-O-methyluridine-3'-phosphate
  modified_base 9: mod_base = OTHER; note = 2'-fluorocytidine-3'-phosphate
  modified_base 10: mod_base = OTHER; note = 2'-fluoroadenosine-3'-phosphate
  modified_base 11: mod_base = OTHER; note = 2'-fluoroguanosine-3'-phosphate
  modified_base 12: mod_base = OTHER; note = 2'-O-methylcytidine-3'-phosphate
  modified_base 13: mod_base = OTHER; note = 2'-O-methyladenosine-3'-phosphate
  modified_base 14: mod_base = OTHER; note = 2'-O-methyluridine-3'-phosphate
  modified_base 15: mod_base = OTHER; note = 2'-O-methylguanosine-3'-phosphate
  modified_base 16: mod_base = OTHER; note = 2'-O-methylcytidine-3'-phosphate
  modified_base 17: mod_base = OTHER; note = 2'-O-methylcytidine-3'-phosphate
  modified_base 18: mod_base = OTHER; note = 2'-O-methyladenosine-3'-phosphate
  modified_base 19: mod_base = OTHER; note = 2'-O-methyladenosine-3'-phosphate
  modified_base 20: mod_base = OTHER; note = 2'-O-methyluridine-3'-phosphate
  modified_base 21: mod_base = OTHER; note = 2'-O-methyladenosine-3'-phosphate N-[tris(GalNAc-alkyl)-amidodecanoyl)]-4-hydroxyprolinol Hyp-(GalNAc-alkyl)3
cagagggtcagcatgccaata

SEQ ID NO: 2847 - RNA, 23 nt, synthetic construct
  source 1..23: mol_type = other RNA; note = Description of Artificial Sequence: Synthetic oligonucleotide
  modified_base 1: mod_base = OTHER; note = 2'-O-methyluridine-3'-phosphorothioate
  modified_base 2: mod_base = OTHER; note = 2'-fluoroadenosine-3'-phosphorothioate
  modified_base 3: mod_base = OTHER; note = 2'-O-methyluridine-3'-phosphate
  modified_base 4: mod_base = OTHER; note = 2'-O-methyluridine-3'-phosphate
  modified_base 5: mod_base = OTHER; note = 2'-O-methylguanosine-3'-phosphate
  modified_base 6: mod_base = OTHER; note = 2'-fluoroguanosine-3'-phosphate
  modified_base 7: mod_base = OTHER; note = 2'-O-methylcytidine-3'-phosphate
  modified_base 8: mod_base = OTHER; note = 2'-fluoroadenosine-3'-phosphate
  modified_base 9: mod_base = OTHER; note = 2'-fluorouridine-3'-phosphate
  modified_base 10: mod_base = OTHER; note = 2'-O-methylguanosine-3'-phosphate
  modified_base 11: mod_base = OTHER; note = 2'-O-methylcytidine-3'-phosphate
  modified_base 12: mod_base = OTHER; note = 2'-O-methyluridine-3'-phosphate
  modified_base 13: mod_base = OTHER; note = 2'-O-methylguanosine-3'-phosphate
  modified_base 14: mod_base = OTHER; note = 2'-fluoroadenosine-3'-phosphate
  modified_base 15: mod_base = OTHER; note = 2'-O-methylcytidine-3'-phosphate
  modified_base 16: mod_base = OTHER; note = 2'-fluorocytidine-3'-phosphate
  modified_base 17: mod_base = OTHER; note = 2'-O-methylcytidine-3'-phosphate
  modified_base 18: mod_base = OTHER; note = 2'-O-methyluridine-3'-phosphate
  modified_base 19: mod_base = OTHER; note = 2'-O-methylcytidine-3'-phosphate
  modified_base 20: mod_base = OTHER; note = 2'-O-methyluridine-3'-phosphate
  modified_base 21: mod_base = OTHER; note = 2'-O-methylguanosine-3'-phosphorothioate
  modified_base 22: mod_base = OTHER; note = 2'-O-methyluridine-3'-phosphorothioate
  modified_base 23: mod_base = OTHER; note = 2'-O-methylcytidine-3'-phosphate
tattggcatgctgaccctctgtc

SEQ ID NO: 2848 - RNA, 21 nt, synthetic construct
  source 1..21: mol_type = other RNA; note = Description of Artificial Sequence: Synthetic oligonucleotide
  modified_base 1: mod_base = OTHER; note = 2'-O-methyladenosine-3'-phosphorothioate
  modified_base 2: mod_base = OTHER; note = 2'-O-methylcytidine-3'-phosphorothioate
  modified_base 3: mod_base = OTHER; note = 2'-O-methyladenosine-3'-phosphate
  modified_base 4: mod_base = OTHER; note = 2'-O-methylguanosine-3'-phosphate
  modified_base 5: mod_base = OTHER; note = 2'-O-methyladenosine-3'-phosphate
  modified_base 6: mod_base = OTHER; note = 2'-O-methylguanosine-3'-phosphate
  modified_base 7: mod_base = OTHER; note = 2'-fluoroguanosine-3'-phosphate
  modified_base 8: mod_base = OTHER; note = 2'-O-methylguanosine-3'-phosphate
  modified_base 9: mod_base = OTHER; note = 2'-fluorouridine-3'-phosphate
  modified_base 10: mod_base = OTHER; note = 2'-fluorocytidine-3'-phosphate
  modified_base 11: mod_base = OTHER; note = 2'-fluoroadenosine-3'-phosphate
  modified_base 12: mod_base = OTHER; note = 2'-O-methylguanosine-3'-phosphate
  modified_base 13: mod_base = OTHER; note = 2'-O-methylcytidine-3'-phosphate
  modified_base 14: mod_base = OTHER; note = 2'-O-methyladenosine-3'-phosphate
  modified_base 15: mod_base = OTHER; note = 2'-O-methyluridine-3'-phosphate
  modified_base 16: mod_base = OTHER; note = 2'-O-methylguanosine-3'-phosphate
  modified_base 17: mod_base = OTHER; note = 2'-O-methylcytidine-3'-phosphate
  modified_base 18: mod_base = OTHER; note = 2'-O-methylcytidine-3'-phosphate
  modified_base 19: mod_base = OTHER; note = 2'-O-methyladenosine-3'-phosphate
  modified_base 20: mod_base = OTHER; note = 2'-O-methyladenosine-3'-phosphate
  modified_base 21: mod_base = OTHER; note = 2'-O-methyluridine-3'-phosphate N-[tris(GalNAc-alkyl)-amidodecanoyl)]-4-hydroxyprolinol Hyp-(GalNAc-alkyl)3
acagagggtcagcatgccaat

SEQ ID NO: 2849 - RNA, 23 nt, synthetic construct
  source 1..23: mol_type = other RNA; note = Description of Artificial Sequence: Synthetic oligonucleotide
  modified_base 1: mod_base = OTHER; note = 2'-O-methyladenosine-3'-phosphorothioate
  modified_base 2: mod_base = OTHER; note = 2'-fluorouridine -3'-phosphorothioate
  modified_base 3: mod_base = OTHER; note = 2'-O-methyluridine-3'-phosphate
  modified_base 4: mod_base = OTHER; note = 2'-O-methylguanosine-3'-phosphate
  modified_base 5: mod_base = OTHER; note = 2'-O-methylguanosine-3'-phosphate
  modified_base 6: mod_base = OTHER; note = 2'-fluorocytidine-3'-phosphate
  modified_base 7: mod_base = OTHER; note = 2'-O-methyladenosine-3'-phosphate
  modified_base 8: mod_base = OTHER; note = 2'-fluorouridine-3'-phosphate
  modified_base 9: mod_base = OTHER; note = 2'-fluoroguanosine-3'-phosphate
  modified_base 10: mod_base = OTHER; note = 2'-O-methylcytidine-3'-phosphate
  modified_base 11: mod_base = OTHER; note = 2'-O-methyluridine-3'-phosphate
  modified_base 12: mod_base = OTHER; note = 2'-O-methylguanosine-3'-phosphate
  modified_base 13: mod_base = OTHER; note = 2'-O-methyladenosine-3'-phosphate
  modified_base 14: mod_base = OTHER; note = 2'-fluorocytidine-3'-phosphate
  modified_base 15: mod_base = OTHER; note = 2'-O-methylcytidine-3'-phosphate
  modified_base 16: mod_base = OTHER; note = 2'-fluorocytidine-3'-phosphate
  modified_base 17: mod_base = OTHER; note = 2'-O-methyluridine-3'-phosphate
  modified_base 18: mod_base = OTHER; note = 2'-O-methylcytidine-3'-phosphate
  modified_base 19: mod_base = OTHER; note = 2'-O-methyluridine-3'-phosphate
  modified_base 20: mod_base = OTHER; note = 2'-O-methylguanosine-3'-phosphate
  modified_base 21: mod_base = OTHER; note = 2'-O-methyluridine-3'-phosphorothioate
  modified_base 22: mod_base = OTHER; note = 2'-O-methylcytidine-3'-phosphorothioate
  modified_base 23: mod_base = OTHER; note = 2'-O-methylcytidine-3'-phosphate
attggcatgctgaccctctgtcc

SEQ ID NO: 2850 - RNA, 21 nt, synthetic construct
  source 1..21: mol_type = other RNA; note = Description of Artificial Sequence: Synthetic oligonucleotide
  modified_base 1: mod_base = OTHER; note = 2'-O-methylguanosine-3'-phosphorothioate
  modified_base 2: mod_base = OTHER; note = 2'-O-methylcytidine-3'-phosphorothioate
  modified_base 3: mod_base = OTHER; note = 2'-O-methyluridine-3'-phosphate
  modified_base 4: mod_base = OTHER; note = 2'-O-methyluridine-3'-phosphate
  modified_base 5: mod_base = OTHER; note = 2'-O-methylguanosine-3'-phosphate
  modified_base 6: mod_base = OTHER; note = 2'-O-methyladenosine-3'-phosphate
  modified_base 7: mod_base = OTHER; note = 2'-fluoroadenosine-3'-phosphate
  modified_base 8: mod_base = OTHER; note = 2'-O-methyluridine-3'-phosphate
  modified_base 9: mod_base = OTHER; note = 2'-fluoroguanosine-3'-phosphate
  modified_base 10: mod_base = OTHER; note = 2'-fluoroguanosine-3'-phosphate
  modified_base 11: mod_base = OTHER; note = 2'-fluoroguanosine-3'-phosphate
  modified_base 12: mod_base = OTHER; note = 2'-O-methyladenosine-3'-phosphate
  modified_base 13: mod_base = OTHER; note = 2'-O-methyluridine-3'-phosphate
  modified_base 14: mod_base = OTHER; note = 2'-O-methylcytidine-3'-phosphate
  modified_base 15: mod_base = OTHER; note = 2'-O-methyluridine-3'-phosphate
  modified_base 16: mod_base = OTHER; note = 2'-O-methyluridine-3'-phosphate
  modified_base 17: mod_base = OTHER; note = 2'-O-methylguanosine-3'-phosphate
  modified_base 18: mod_base = OTHER; note = 2'-O-methylguanosine-3'-phosphate
  modified_base 19: mod_base = OTHER; note = 2'-O-methyluridine-3'-phosphate
  modified_base 20: mod_base = OTHER; note = 2'-O-methylguanosine-3'-phosphate
  modified_base 21: mod_base = OTHER; note = 2'-O-methyluridine-3'-phosphate N-[tris(GalNAc-alkyl)-amidodecanoyl)]-4-hydroxyprolinol Hyp-(GalNAc-alkyl)3
gcttgaatgggatcttggtgt

SEQ ID NO: 2851 - RNA, 23 nt, synthetic construct
  source 1..23: mol_type = other RNA; note = Description of Artificial Sequence: Synthetic oligonucleotide
  modified_base 1: mod_base = OTHER; note = 2'-O-methyladenosine-3'-phosphorothioate
  modified_base 2: mod_base = OTHER; note = 2'-fluorocytidine-3'-phosphorothioate
  modified_base 3: mod_base = OTHER; note = 2'-O-methyladenosine-3'-phosphate
  modified_base 4: mod_base = OTHER; note = 2'-O-methylcytidine-3'-phosphate
  modified_base 5: mod_base = OTHER; note = 2'-O-methylcytidine-3'-phosphate
  modified_base 6: mod_base = OTHER; note = 2'-fluoroadenosine-3'-phosphate
  modified_base 7: mod_base = OTHER; note = 2'-O-methyladenosine-3'-phosphate
  modified_base 8: mod_base = OTHER; note = 2'-fluoroguanosine-3'-phosphate
  modified_base 9: mod_base = OTHER; note = 2'-fluoroadenosine-3'-phosphate
  modified_base 10: mod_base = OTHER; note = 2'-O-methyluridine-3'-phosphate
  modified_base 11: mod_base = OTHER; note = 2'-O-methylcytidine-3'-phosphate
  modified_base 12: mod_base = OTHER; note = 2'-O-methylcytidine-3'-phosphate
  modified_base 13: mod_base = OTHER; note = 2'-O-methylcytidine-3'-phosphate
  modified_base 14: mod_base = OTHER; note = 2'-fluoroadenosine-3'-phosphate
  modified_base 15: mod_base = OTHER; note = 2'-O-methyluridine-3'-phosphate
  modified_base 16: mod_base = OTHER; note = 2'-fluorouridine-3'-phosphate
  modified_base 17: mod_base = OTHER; note = 2'-O-methylcytidine-3'-phosphate
  modified_base 18: mod_base = OTHER; note = 2'-O-methyladenosine-3'-phosphate
  modified_base 19: mod_base = OTHER; note = 2'-O-methyladenosine-3'-phosphate
  modified_base 20: mod_base = OTHER; note = 2'-O-methylguanosine-3'-phosphate
  modified_base 21: mod_base = OTHER; note = 2'-O-methylcytidine-3'-phosphorothioate
  modified_base 22: mod_base = OTHER; note = 2'-O-methylcytidine-3'-phosphorothioate
  modified_base 23: mod_base = OTHER; note = 2'-O-methyladenosine-3'-phosphate
acaccaagatcccattcaagcca

SEQ ID NO: 2852 - RNA, 21 nt, synthetic construct
  source 1..21: mol_type = other RNA; note = Description of Artificial Sequence: Synthetic oligonucleotide
  modified_base 1: mod_base = OTHER; note = 2'-O-methylcytidine-3'-phosphorothioate
  modified_base 2: mod_base = OTHER; note = 2'-O-methyluridine-3'-phosphorothioate
  modified_base 3: mod_base = OTHER; note = 2'-O-methyluridine-3'-phosphate
  modified_base 4: mod_base = OTHER; note = 2'-O-methylguanosine-3'-phosphate
  modified_base 5: mod_base = OTHER; note = 2'-O-methyladenosine-3'-phosphate
  modified_base 6: mod_base = OTHER; note = 2'-O-methyladenosine-3'-phosphate
  modified_base 7: mod_base = OTHER; note = 2'-fluorouridine-3'-phosphate
  modified_base 8: mod_base = OTHER; note = 2'-O-methylguanosine-3'-phosphate
  modified_base 9: mod_base = OTHER; note = 2'-fluoroguanosine-3'-phosphate
  modified_base 10: mod_base = OTHER; note = 2'-fluoroguanosine-3'-phosphate
  modified_base 11: mod_base = OTHER; note = 2'-fluoroadenosine-3'-phosphate
  modified_base 12: mod_base = OTHER; note = 2'-O-methyluridine-3'-phosphate
  modified_base 13: mod_base = OTHER; note = 2'-O-methylcytidine-3'-phosphate
  modified_base 14: mod_base = OTHER; note = 2'-O-methyluridine-3'-phosphate
  modified_base 15: mod_base = OTHER; note = 2'-O-methyluridine-3'-phosphate
  modified_base 16: mod_base = OTHER; note = 2'-O-methylguanosine-3'-phosphate
  modified_base 17: mod_base = OTHER; note = 2'-O-methylguanosine-3'-phosphate
  modified_base 18: mod_base = OTHER; note = 2'-O-methyluridine-3'-phosphate
  modified_base 19: mod_base = OTHER; note = 2'-O-methylguanosine-3'-phosphate
  modified_base 20: mod_base = OTHER; note = 2'-O-methyluridine-3'-phosphate
  modified_base 21: mod_base = OTHER; note = 2'-O-methylcytidine-3'-phosphate N-[tris(GalNAc-alkyl)-amidodecanoyl)]-4-hydroxyprolinol Hyp-(GalNAc-alkyl)3
cttgaatgggatcttggtgtc

SEQ ID NO: 2853 - RNA, 23 nt, synthetic construct
  source 1..23: mol_type = other RNA; note = Description of Artificial Sequence: Synthetic oligonucleotide
  modified_base 1: mod_base = OTHER; note = 2'-O-methylguanosine-3'-phosphorothioate
  modified_base 2: mod_base = OTHER; note = 2'-fluoroadenosine-3'-phosphorothioate
  modified_base 3: mod_base = OTHER; note = 2'-O-methylcytidine-3'-phosphate
  modified_base 4: mod_base = OTHER; note = 2'-O-methyladenosine-3'-phosphate
  modified_base 5: mod_base = OTHER; note = 2'-O-methylcytidine-3'-phosphate
  modified_base 6: mod_base = OTHER; note = 2'-fluorocytidine-3'-phosphate
  modified_base 7: mod_base = OTHER; note = 2'-O-methyladenosine-3'-phosphate
  modified_base 8: mod_base = OTHER; note = 2'-fluoroadenosine-3'-phosphate
  modified_base 9: mod_base = OTHER; note = 2'-fluoroguanosine-3'-phosphate
  modified_base 10: mod_base = OTHER; note = 2'-O-methyladenosine-3'-phosphate
  modified_base 11: mod_base = OTHER; note = 2'-O-methyluridine-3'-phosphate
  modified_base 12: mod_base = OTHER; note = 2'-O-methylcytidine-3'-phosphate
  modified_base 13: mod_base = OTHER; note = 2'-O-methylcytidine-3'-phosphate
  modified_base 14: mod_base = OTHER; note = 2'-fluorocytidine-3'-phosphate
  modified_base 15: mod_base = OTHER; note = 2'-O-methyladenosine-3'-phosphate
  modified_base 16: mod_base = OTHER; note = 2'-fluorouridine-3'-phosphate
  modified_base 17: mod_base = OTHER; note = 2'-O-methyluridine-3'-phosphate
  modified_base 18: mod_base = OTHER; note = 2'-O-methylcytidine-3'-phosphate
  modified_base 19: mod_base = OTHER; note = 2'-O-methyladenosine-3'-phosphate
  modified_base 20: mod_base = OTHER; note = 2'-O-methyladenosine-3'-phosphate
  modified_base 21: mod_base = OTHER; note = 2'-O-methylguanosine-3'-phosphorothioate
  modified_base 22: mod_base = OTHER; note = 2'-O-methylcytidine-3'-phosphorothioate
  modified_base 23: mod_base = OTHER; note = 2'-O-methylcytidine-3'-phosphate
gacaccaagatcccattcaagcc

SEQ ID NO: 2854 - RNA, 21 nt, synthetic construct
  source 1..21: mol_type = other RNA; note = Description of Artificial Sequence: Synthetic oligonucleotide
  modified_base 1: mod_base = OTHER; note = 2'-O-methylcytidine-3'-phosphorothioate
  modified_base 2: mod_base = OTHER; note = 2'-O-methyladenosine-3'-phosphorothioate
  modified_base 3: mod_base = OTHER; note = 2'-O-methyluridine-3'-phosphate
  modified_base 4: mod_base = OTHER; note = 2'-O-methylguanosine-3'-phosphate
  modified_base 5: mod_base = OTHER; note = 2'-O-methylguanosine-3'-phosphate
  modified_base 6: mod_base = OTHER; note = 2'-O-methylcytidine-3'-phosphate
  modified_base 7: mod_base = OTHER; note = 2'-fluorouridine-3'-phosphate
  modified_base 8: mod_base = OTHER; note = 2'-O-methyluridine-3'-phosphate
  modified_base 9: mod_base = OTHER; note = 2'-fluoroguanosine-3'-phosphate
  modified_base 10: mod_base = OTHER; note = 2'-fluoroadenosine-3'-phosphate
  modified_base 11: mod_base = OTHER; note = 2'-fluoroadenosine-3'-phosphate
  modified_base 12: mod_base = OTHER; note = 2'-O-methyluridine-3'-phosphate
  modified_base 13: mod_base = OTHER; note = 2'-O-methylguanosine-3'-phosphate
  modified_base 14: mod_base = OTHER; note = 2'-O-methylguanosine-3'-phosphate
  modified_base 15: mod_base = OTHER; note = 2'-O-methylguanosine-3'-phosphate
  modified_base 16: mod_base = OTHER; note = 2'-O-methyladenosine-3'-phosphate
  modified_base 17: mod_base = OTHER; note = 2'-O-methyluridine-3'-phosphate
  modified_base 18: mod_base = OTHER; note = 2'-O-methylcytidine-3'-phosphate
  modified_base 19: mod_base = OTHER; note = 2'-O-methyluridine-3'-phosphate
  modified_base 20: mod_base = OTHER; note = 2'-O-methyluridine-3'-phosphate
  modified_base 21: mod_base = OTHER; note = 2'-O-methylguanosine-3'-phosphate N-[tris(GalNAc-alkyl)-amidodecanoyl)]-4-hydroxyprolinol Hyp-(GalNAc-alkyl)3
catggcttgaatgggatcttg

SEQ ID NO: 2855 - RNA, 23 nt, synthetic construct
  source 1..23: mol_type = other RNA; note = Description of Artificial Sequence: Synthetic oligonucleotide
  modified_base 1: mod_base = OTHER; note = 2'-O-methylcytidine-3'-phosphorothioate
  modified_base 2: mod_base = OTHER; note = 2'-fluoroadenosine-3'-phosphorothioate
  modified_base 3: mod_base = OTHER; note = 2'-O-methyladenosine-3'-phosphate
  modified_base 4: mod_base = OTHER; note = 2'-O-methylguanosine-3'-phosphate
  modified_base 5: mod_base = OTHER; note = 2'-O-methyladenosine-3'-phosphate
  modified_base 6: mod_base = OTHER; note = 2'-fluorouridine-3'-phosphate
  modified_base 7: mod_base = OTHER; note = 2'-O-methylcytidine-3'-phosphate
  modified_base 8: mod_base = OTHER; note = 2'-fluorocytidine-3'-phosphate
  modified_base 9: mod_base = OTHER; note = 2'-fluorocytidine-3'-phosphate
  modified_base 10: mod_base = OTHER; note = 2'-O-methyladenosine-3'-phosphate
  modified_base 11: mod_base = OTHER; note = 2'-O-methyluridine-3'-phosphate
  modified_base 12: mod_base = OTHER; note = 2'-O-methyluridine-3'-phosphate
  modified_base 13: mod_base = OTHER; note = 2'-O-methylcytidine-3'-phosphate
  modified_base 14: mod_base = OTHER; note = 2'-fluoroadenosine-3'-phosphate
  modified_base 15: mod_base = OTHER; note = 2'-O-methyladenosine-3'-phosphate
  modified_base 16: mod_base = OTHER; note = 2'-fluoroguanosine-3'-phosphate
  modified_base 17: mod_base = OTHER; note = 2'-O-methylcytidine-3'-phosphate
  modified_base 18: mod_base = OTHER; note = 2'-O-methylcytidine-3'-phosphate
  modified_base 19: mod_base = OTHER; note = 2'-O-methyladenosine-3'-phosphate
  modified_base 20: mod_base = OTHER; note = 2'-O-methyluridine-3'-phosphate
  modified_base 21: mod_base = OTHER; note = 2'-O-methylguanosine-3'-phosphorothioate
  modified_base 22: mod_base = OTHER; note = 2'-O-methyluridine-3'-phosphorothioate
  modified_base 23: mod_base = OTHER; note = 2'-O-methyluridine-3'-phosphate
caagatcccattcaagccatgtt

SEQ ID NO: 2856 - RNA, 21 nt, synthetic construct
  source 1..21: mol_type = other RNA; note = Description of Artificial Sequence: Synthetic oligonucleotide
  modified_base 1: mod_base = OTHER; note = 2'-O-methyladenosine-3'-phosphorothioate
  modified_base 2: mod_base = OTHER; note = 2'-O-methylcytidine-3'-phosphorothioate
  modified_base 3: mod_base = OTHER; note = 2'-O-methyladenosine-3'-phosphate
  modified_base 4: mod_base = OTHER; note = 2'-O-methyluridine-3'-phosphate
  modified_base 5: mod_base = OTHER; note = 2'-O-methylguanosine-3'-phosphate
  modified_base 6: mod_base = OTHER; note = 2'-O-methylguanosine-3'-phosphate
  modified_base 7: mod_base = OTHER; note = 2'-fluorocytidine-3'-phosphate
  modified_base 8: mod_base = OTHER; note = 2'-O-methyluridine-3'-phosphate
  modified_base 9: mod_base = OTHER; note = 2'-fluorouridine-3'-phosphate
  modified_base 10: mod_base = OTHER; note = 2'-fluoroguanosine-3'-phosphate
  modified_base 11: mod_base = OTHER; note = 2'-fluoroadenosine-3'-phosphate
  modified_base 12: mod_base = OTHER; note = 2'-O-methyladenosine-3'-phosphate
  modified_base 13: mod_base = OTHER; note = 2'-O-methyluridine-3'-phosphate
  modified_base 14: mod_base = OTHER; note = 2'-O-methylguanosine-3'-phosphate
  modified_base 15: mod_base = OTHER; note = 2'-O-methylguanosine-3'-phosphate
  modified_base 16: mod_base = OTHER; note = 2'-O-methylguanosine-3'-phosphate
  modified_base 17: mod_base = OTHER; note = 2'-O-methyladenosine-3'-phosphate
  modified_base 18: mod_base = OTHER; note = 2'-O-methyluridine-3'-phosphate
  modified_base 19: mod_base = OTHER; note = 2'-O-methylcytidine-3'-phosphate
  modified_base 20: mod_base = OTHER; note = 2'-O-methyluridine-3'-phosphate
  modified_base 21: mod_base = OTHER; note = 2'-O-methyluridine-3'-phosphate N-[tris(GalNAc-alkyl)-amidodecanoyl)]-4-hydroxyprolinol Hyp-(GalNAc-alkyl)3
acatggcttgaatgggatctt

SEQ ID NO: 2857 - RNA, 23 nt, synthetic construct
  source 1..23: mol_type = other RNA; note = Description of Artificial Sequence: Synthetic oligonucleotide
  modified_base 1: mod_base = OTHER; note = 2'-O-methyladenosine-3'-phosphorothioate
  modified_base 2: mod_base = OTHER; note = 2'-fluoroadenosine-3'-phosphorothioate
  modified_base 3: mod_base = OTHER; note = 2'-O-methylguanosine-3'-phosphate
  modified_base 4: mod_base = OTHER; note = 2'-O-methyladenosine-3'-phosphate
  modified_base 5: mod_base = OTHER; note = 2'-O-methyluridine-3'-phosphate
  modified_base 6: mod_base = OTHER; note = 2'-fluorocytidine-3'-phosphate
  modified_base 7: mod_base = OTHER; note = 2'-O-methylcytidine-3'-phosphate
  modified_base 8: mod_base = OTHER; note = 2'-fluorocytidine-3'-phosphate
  modified_base 9: mod_base = OTHER; note = 2'-fluoroadenosine-3'-phosphate
  modified_base 10: mod_base = OTHER; note = 2'-O-methyluridine-3'-phosphate
  modified_base 11: mod_base = OTHER; note = 2'-O-methyluridine-3'-phosphate
  modified_base 12: mod_base = OTHER; note = 2'-O-methylcytidine-3'-phosphate
  modified_base 13: mod_base = OTHER; note = 2'-O-methyladenosine-3'-phosphate
  modified_base 14: mod_base = OTHER; note = 2'-fluoroadenosine-3'-phosphate
  modified_base 15: mod_base = OTHER; note = 2'-O-methylguanosine-3'-phosphate
  modified_base 16: mod_base = OTHER; note = 2'-fluorocytidine-3'-phosphate
  modified_base 17: mod_base = OTHER; note = 2'-O-methylcytidine-3'-phosphate
  modified_base 18: mod_base = OTHER; note = 2'-O-methyladenosine-3'-phosphate
  modified_base 19: mod_base = OTHER; note = 2'-O-methyluridine-3'-phosphate
  modified_base 20: mod_base = OTHER; note = 2'-O-methylguanosine-3'-phosphate
  modified_base 21: mod_base = OTHER; note = 2'-O-methyluridine-3'-phosphorothioate
  modified_base 22: mod_base = OTHER; note = 2'-O-methyluridine-3'-phosphorothioate
  modified_base 23: mod_base = OTHER; note = 2'-O-methyluridine-3'-phosphate
aagatcccattcaagccatgttt

SEQ ID NO: 2858 - RNA, 21 nt, synthetic construct
  source 1..21: mol_type = other RNA; note = Description of Artificial Sequence: Synthetic oligonucleotide
  modified_base 1: mod_base = OTHER; note = 2'-O-methyluridine-3'-phosphorothioate
  modified_base 2: mod_base = OTHER; note = 2'-O-methylcytidine-3'-phosphorothioate
  modified_base 3: mod_base = OTHER; note = 2'-O-methyladenosine-3'-phosphate
  modified_base 4: mod_base = OTHER; note = 2'-O-methyladenosine-3'-phosphate
  modified_base 5: mod_base = OTHER; note = 2'-O-methyladenosine-3'-phosphate
  modified_base 6: mod_base = OTHER; note = 2'-O-methyluridine-3'-phosphate
  modified_base 7: mod_base = OTHER; note = 2'-fluoroguanosine-3'-phosphate
  modified_base 8: mod_base = OTHER; note = 2'-O-methylguanosine-3'-phosphate
  modified_base 9: mod_base = OTHER; note = 2'-fluorocytidine-3'-phosphate
  modified_base 10: mod_base = OTHER; note = 2'-fluorouridine-3'-phosphate
  modified_base 11: mod_base = OTHER; note = 2'-fluoroguanosine-3'-phosphate
  modified_base 12: mod_base = OTHER; note = 2'-O-methyladenosine-3'-phosphate
  modified_base 13: mod_base = OTHER; note = 2'-O-methylguanosine-3'-phosphate
  modified_base 14: mod_base = OTHER; note = 2'-O-methyladenosine-3'-phosphate
  modified_base 15: mod_base = OTHER; note = 2'-O-methyladenosine-3'-phosphate
  modified_base 16: mod_base = OTHER; note = 2'-O-methylguanosine-3'-phosphate
  modified_base 17: mod_base = OTHER; note = 2'-O-methyladenosine-3'-phosphate
  modified_base 18: mod_base = OTHER; note = 2'-O-methylcytidine-3'-phosphate
  modified_base 19: mod_base = OTHER; note = 2'-O-methyluridine-3'-phosphate
  modified_base 20: mod_base = OTHER; note = 2'-O-methylguanosine-3'-phosphate
  modified_base 21: mod_base = OTHER; note = 2'-O-methyladenosine-3'-phosphate N-[tris(GalNAc-alkyl)-amidodecanoyl)]-4-hydroxyprolinol Hyp-(GalNAc-alkyl)3
tcaaatggctgagaagactga

SEQ ID NO: 2859 - RNA, 23 nt, synthetic construct
  source 1..23: mol_type = other RNA; note = Description of Artificial Sequence: Synthetic oligonucleotide
  modified_base 1: mod_base = OTHER; note = 2'-O-methyluridine-3'-phosphorothioate
  modified_base 2: mod_base = OTHER; note = 2'-fluorocytidine-3'-phosphorothioate
  modified_base 3: mod_base = OTHER; note = 2'-O-methyladenosine-3'-phosphate
  modified_base 4: mod_base = OTHER; note = 2'-O-methylguanosine-3'-phosphate
  modified_base 5: mod_base = OTHER; note = 2'-O-methyluridine-3'-phosphate
  modified_base 6: mod_base = OTHER; note = 2'-fluorocytidine-3'-phosphate
  modified_base 7: mod_base = OTHER; note = 2'-O-methyluridine-3'-phosphate
  modified_base 8: mod_base = OTHER; note = 2'-fluorouridine-3'-phosphate
  modified_base 9: mod_base = OTHER; note = 2'-fluorocytidine-3'-phosphate
  modified_base 10: mod_base = OTHER; note = 2'-O-methyluridine-3'-phosphate
  modified_base 11: mod_base = OTHER; note = 2'-O-methylcytidine-3'-phosphate
  modified_base 12: mod_base = OTHER; note = 2'-O-methyladenosine-3'-phosphate
  modified_base 13: mod_base = OTHER; note = 2'-O-methylguanosine-3'-phosphate
  modified_base 14: mod_base = OTHER; note = 2'-fluorocytidine-3'-phosphate
  modified_base 15: mod_base = OTHER; note = 2'-O-methylcytidine-3'-phosphate
  modified_base 16: mod_base = OTHER; note = 2'-fluoroadenosine-3'-phosphate
  modified_base 17: mod_base = OTHER; note = 2'-O-methyluridine-3'-phosphate
  modified_base 18: mod_base = OTHER; note = 2'-O-methyluridine-3'-phosphate
  modified_base 19: mod_base = OTHER; note = 2'-O-methyluridine-3'-phosphate
  modified_base 20: mod_base = OTHER; note = 2'-O-methylguanosine-3'-phosphate
  modified_base 21: mod_base = OTHER; note = 2'-O-methyladenosine-3'-phosphorothioate
  modified_base 22: mod_base = OTHER; note = 2'-O-methyluridine-3'-phosphorothioate
  modified_base 23: mod_base = OTHER; note = 2'-O-methyladenosine-3'-phosphate
tcagtcttctcagccatttgata

SEQ ID NO: 2860 - RNA, 21 nt, synthetic construct
  source 1..21: mol_type = other RNA; note = Description of Artificial Sequence: Synthetic oligonucleotide
  modified_base 1: mod_base = OTHER; note = 2'-O-methylcytidine-3'-phosphorothioate
  modified_base 2: mod_base = OTHER; note = 2'-O-methyladenosine-3'-phosphorothioate
  modified_base 3: mod_base = OTHER; note = 2'-O-methyladenosine-3'-phosphate
  modified_base 4: mod_base = OTHER; note = 2'-O-methyladenosine-3'-phosphate
  modified_base 5: mod_base = OTHER; note = 2'-O-methyluridine-3'-phosphate
  modified_base 6: mod_base = OTHER; note = 2'-O-methylguanosine-3'-phosphate
  modified_base 7: mod_base = OTHER; note = 2'-fluoroguanosine-3'-phosphate
  modified_base 8: mod_base = OTHER; note = 2'-O-methylcytidine-3'-phosphate
  modified_base 9: mod_base = OTHER; note = 2'-fluorouridine-3'-phosphate
  modified_base 10: mod_base = OTHER; note = 2'-fluoroguanosine-3'-phosphate
  modified_base 11: mod_base = OTHER; note = 2'-fluoroadenosine-3'-phosphate
  modified_base 12: mod_base = OTHER; note = 2'-O-methylguanosine-3'-phosphate
  modified_base 13: mod_base = OTHER; note = 2'-O-methyladenosine-3'-phosphate
  modified_base 14: mod_base = OTHER; note = 2'-O-methyladenosine-3'-phosphate
  modified_base 15: mod_base = OTHER; note = 2'-O-methylguanosine-3'-phosphate
  modified_base 16: mod_base = OTHER; note = 2'-O-methyladenosine-3'-phosphate
  modified_base 17: mod_base = OTHER; note = 2'-O-methylcytidine-3'-phosphate
  modified_base 18: mod_base = OTHER; note = 2'-O-methyluridine-3'-phosphate
  modified_base 19: mod_base = OTHER; note = 2'-O-methylguanosine-3'-phosphate
  modified_base 20: mod_base = OTHER; note = 2'-O-methyladenosine-3'-phosphate
  modified_base 21: mod_base = OTHER; note = 2'-O-methylcytidine-3'-phosphate N-[tris(GalNAc-alkyl)-amidodecanoyl)]-4-hydroxyprolinol Hyp-(GalNAc-alkyl)3
caaatggctgagaagactgac

SEQ ID NO: 2861 - RNA, 23 nt, synthetic construct
  source 1..23: mol_type = other RNA; note = Description of Artificial Sequence: Synthetic oligonucleotide
  modified_base 1: mod_base = OTHER; note = 2'-O-methylguanosine-3'-phosphorothioate
  modified_base 2: mod_base = OTHER; note = 2'-fluorouridine -3'-phosphorothioate
  modified_base 3: mod_base = OTHER; note = 2'-O-methylcytidine-3'-phosphate
  modified_base 4: mod_base = OTHER; note = 2'-O-methyladenosine-3'-phosphate
  modified_base 5: mod_base = OTHER; note = 2'-O-methylguanosine-3'-phosphate
  modified_base 6: mod_base = OTHER; note = 2'-fluorouridine-3'-phosphate
  modified_base 7: mod_base = OTHER; note = 2'-O-methylcytidine-3'-phosphate
  modified_base 8: mod_base = OTHER; note = 2'-fluorouridine-3'-phosphate
  modified_base 9: mod_base = OTHER; note = 2'-fluorouridine-3'-phosphate
  modified_base 10: mod_base = OTHER; note = 2'-O-methylcytidine-3'-phosphate
  modified_base 11: mod_base = OTHER; note = 2'-O-methyluridine-3'-phosphate
  modified_base 12: mod_base = OTHER; note = 2'-O-methylcytidine-3'-phosphate
  modified_base 13: mod_base = OTHER; note = 2'-O-methyladenosine-3'-phosphate
  modified_base 14: mod_base = OTHER; note = 2'-fluoroguanosine-3'-phosphate
  modified_base 15: mod_base = OTHER; note = 2'-O-methylcytidine-3'-phosphate
  modified_base 16: mod_base = OTHER; note = 2'-fluorocytidine-3'-phosphate
  modified_base 17: mod_base = OTHER; note = 2'-O-methyladenosine-3'-phosphate
  modified_base 18: mod_base = OTHER; note = 2'-O-methyluridine-3'-phosphate
  modified_base 19: mod_base = OTHER; note = 2'-O-methyluridine-3'-phosphate
  modified_base 20: mod_base = OTHER; note = 2'-O-methyluridine-3'-phosphate
  modified_base 21: mod_base = OTHER; note = 2'-O-methylguanosine-3'-phosphorothioate
  modified_base 22: mod_base = OTHER; note = 2'-O-methyladenosine-3'-phosphorothioate
  modified_base 23: mod_base = OTHER; note = 2'-O-methyluridine-3'-phosphate
gtcagtcttctcagccatttgat

SEQ ID NO: 2862 - RNA, 21 nt, synthetic construct
  source 1..21: mol_type = other RNA; note = Description of Artificial Sequence: Synthetic oligonucleotide
  modified_base 1: mod_base = OTHER; note = 2'-O-methylguanosine-3'-phosphorothioate
  modified_base 2: mod_base = OTHER; note = 2'-O-methyladenosine-3'-phosphorothioate
  modified_base 3: mod_base = OTHER; note = 2'-O-methyluridine-3'-phosphate
  modified_base 4: mod_base = OTHER; note = 2'-O-methyladenosine-3'-phosphate
  modified_base 5: mod_base = OTHER; note = 2'-O-methyluridine-3'-phosphate
  modified_base 6: mod_base = OTHER; note = 2'-O-methylcytidine-3'-phosphate
  modified_base 7: mod_base = OTHER; note = 2'-fluoroadenosine-3'-phosphate
  modified_base 8: mod_base = OTHER; note = 2'-O-methyladenosine-3'-phosphate
  modified_base 9: mod_base = OTHER; note = 2'-fluoroadenosine-3'-phosphate
  modified_base 10: mod_base = OTHER; note = 2'-fluorouridine-3'-phosphate
  modified_base 11: mod_base = OTHER; note = 2'-fluoroguanosine-3'-phosphate
  modified_base 12: mod_base = OTHER; note = 2'-O-methylguanosine-3'-phosphate
  modified_base 13: mod_base = OTHER; note = 2'-O-methylcytidine-3'-phosphate
  modified_base 14: mod_base = OTHER; note = 2'-O-methyluridine-3'-phosphate
  modified_base 15: mod_base = OTHER; note = 2'-O-methylguanosine-3'-phosphate
  modified_base 16: mod_base = OTHER; note = 2'-O-methyladenosine-3'-phosphate
  modified_base 17: mod_base = OTHER; note = 2'-O-methylguanosine-3'-phosphate
  modified_base 18: mod_base = OTHER; note = 2'-O-methyladenosine-3'-phosphate
  modified_base 19: mod_base = OTHER; note = 2'-O-methyladenosine-3'-phosphate
  modified_base 20: mod_base = OTHER; note = 2'-O-methylguanosine-3'-phosphate
  modified_base 21: mod_base = OTHER; note = 2'-O-methyladenosine-3'-phosphate N-[tris(GalNAc-alkyl)-amidodecanoyl)]-4-hydroxyprolinol Hyp-(GalNAc-alkyl)3
gatatcaaatggctgagaaga

SEQ ID NO: 2863 - RNA, 23 nt, synthetic construct
  source 1..23: mol_type = other RNA; note = Description of Artificial Sequence: Synthetic oligonucleotide
  modified_base 1: mod_base = OTHER; note = 2'-O-methyluridine-3'-phosphorothioate
  modified_base 2: mod_base = OTHER; note = 2'-fluorocytidine-3'-phosphorothioate
  modified_base 3: mod_base = OTHER; note = 2'-O-methyluridine-3'-phosphate
  modified_base 4: mod_base = OTHER; note = 2'-O-methyluridine-3'-phosphate
  modified_base 5: mod_base = OTHER; note = 2'-O-methylcytidine-3'-phosphate
  modified_base 6: mod_base = OTHER; note = 2'-fluorouridine-3'-phosphate
  modified_base 7: mod_base = OTHER; note = 2'-O-methylcytidine-3'-phosphate
  modified_base 8: mod_base = OTHER; note = 2'-fluoroadenosine-3'-phosphate
  modified_base 9: mod_base = OTHER; note = 2'-fluoroguanosine-3'-phosphate
  modified_base 10: mod_base = OTHER; note = 2'-O-methylcytidine-3'-phosphate
  modified_base 11: mod_base = OTHER; note = 2'-O-methylcytidine-3'-phosphate
  modified_base 12: mod_base = OTHER; note = 2'-O-methyladenosine-3'-phosphate
  modified_base 13: mod_base = OTHER; note = 2'-O-methyluridine-3'-phosphate
  modified_base 14: mod_base = OTHER; note = 2'-fluorouridine-3'-phosphate
  modified_base 15: mod_base = OTHER; note = 2'-O-methyluridine-3'-phosphate
  modified_base 16: mod_base = OTHER; note = 2'-fluoroguanosine-3'-phosphate
  modified_base 17: mod_base = OTHER; note = 2'-O-methyladenosine-3'-phosphate
  modified_base 18: mod_base = OTHER; note = 2'-O-methyluridine-3'-phosphate
  modified_base 19: mod_base = OTHER; note = 2'-O-methyladenosine-3'-phosphate
  modified_base 20: mod_base = OTHER; note = 2'-O-methyluridine-3'-phosphate
  modified_base 21: mod_base = OTHER; note = 2'-O-methylcytidine-3'-phosphorothioate
  modified_base 22: mod_base = OTHER; note = 2'-O-methyluridine-3'-phosphorothioate
  modified_base 23: mod_base = OTHER; note = 2'-O-methyluridine-3'-phosphate
tcttctcagccatttgatatctt

SEQ ID NO: 2864 - RNA, 21 nt, synthetic construct
  source 1..21: mol_type = other RNA; note = Description of Artificial Sequence: Synthetic oligonucleotide
  modified_base 1: mod_base = OTHER; note = 2'-O-methyladenosine-3'-phosphorothioate
  modified_base 2: mod_base = OTHER; note = 2'-O-methylguanosine-3'-phosphorothioate
  modified_base 3: mod_base = OTHER; note = 2'-O-methyladenosine-3'-phosphate
  modified_base 4: mod_base = OTHER; note = 2'-O-methyluridine-3'-phosphate
  modified_base 5: mod_base = OTHER; note = 2'-O-methyladenosine-3'-phosphate
  modified_base 6: mod_base = OTHER; note = 2'-O-methyluridine-3'-phosphate
  modified_base 7: mod_base = OTHER; note = 2'-fluorocytidine-3'-phosphate
  modified_base 8: mod_base = OTHER; note = 2'-O-methyladenosine-3'-phosphate
  modified_base 9: mod_base = OTHER; note = 2'-fluoroadenosine-3'-phosphate
  modified_base 10: mod_base = OTHER; note = 2'-fluoroadenosine-3'-phosphate
  modified_base 11: mod_base = OTHER; note = 2'-fluorouridine-3'-phosphate
  modified_base 12: mod_base = OTHER; note = 2'-O-methylguanosine-3'-phosphate
  modified_base 13: mod_base = OTHER; note = 2'-O-methylguanosine-3'-phosphate
  modified_base 14: mod_base = OTHER; note = 2'-O-methylcytidine-3'-phosphate
  modified_base 15: mod_base = OTHER; note = 2'-O-methyluridine-3'-phosphate
  modified_base 16: mod_base = OTHER; note = 2'-O-methylguanosine-3'-phosphate
  modified_base 17: mod_base = OTHER; note = 2'-O-methyladenosine-3'-phosphate
  modified_base 18: mod_base = OTHER; note = 2'-O-methylguanosine-3'-phosphate
  modified_base 19: mod_base = OTHER; note = 2'-O-methyladenosine-3'-phosphate
  modified_base 20: mod_base = OTHER; note = 2'-O-methyladenosine-3'-phosphate
  modified_base 21: mod_base = OTHER; note = 2'-O-methylguanosine-3'-phosphate N-[tris(GalNAc-alkyl)-amidodecanoyl)]-4-hydroxyprolinol Hyp-(GalNAc-alkyl)3
agatatcaaatggctgagaag

SEQ ID NO: 2865 - RNA, 23 nt, synthetic construct
  source 1..23: mol_type = other RNA; note = Description of Artificial Sequence: Synthetic oligonucleotide
  modified_base 1: mod_base = OTHER; note = 2'-O-methylcytidine-3'-phosphorothioate
  modified_base 2: mod_base = OTHER; note = 2'-fluorouridine -3'-phosphorothioate
  modified_base 3: mod_base = OTHER; note = 2'-O-methyluridine-3'-phosphate
  modified_base 4: mod_base = OTHER; note = 2'-O-methylcytidine-3'-phosphate
  modified_base 5: mod_base = OTHER; note = 2'-O-methyluridine-3'-phosphate
  modified_base 6: mod_base = OTHER; note = 2'-fluorocytidine-3'-phosphate
  modified_base 7: mod_base = OTHER; note = 2'-O-methyladenosine-3'-phosphate
  modified_base 8: mod_base = OTHER; note = 2'-fluoroguanosine-3'-phosphate
  modified_base 9: mod_base = OTHER; note = 2'-fluorocytidine-3'-phosphate
  modified_base 10: mod_base = OTHER; note = 2'-O-methylcytidine-3'-phosphate
  modified_base 11: mod_base = OTHER; note = 2'-O-methyladenosine-3'-phosphate
  modified_base 12: mod_base = OTHER; note = 2'-O-methyluridine-3'-phosphate
  modified_base 13: mod_base = OTHER; note = 2'-O-methyluridine-3'-phosphate
  modified_base 14: mod_base = OTHER; note = 2'-fluorouridine-3'-phosphate
  modified_base 15: mod_base = OTHER; note = 2'-O-methylguanosine-3'-phosphate
  modified_base 16: mod_base = OTHER; note = 2'-fluoroadenosine-3'-phosphate
  modified_base 17: mod_base = OTHER; note = 2'-O-methyluridine-3'-phosphate
  modified_base 18: mod_base = OTHER; note = 2'-O-methyladenosine-3'-phosphate
  modified_base 19: mod_base = OTHER; note = 2'-O-methyluridine-3'-phosphate
  modified_base 20: mod_base = OTHER; note = 2'-O-methylcytidine-3'-phosphate
  modified_base 21: mod_base = OTHER; note = 2'-O-methyluridine-3'-phosphorothioate
  modified_base 22: mod_base = OTHER; note = 2'-O-methyluridine-3'-phosphorothioate
  modified_base 23: mod_base = OTHER; note = 2'-O-methylcytidine-3'-phosphate
cttctcagccatttgatatcttc

SEQ ID NO: 2866 - RNA, 21 nt, synthetic construct
  source 1..21: mol_type = other RNA; note = Description of Artificial Sequence: Synthetic oligonucleotide
  modified_base 1: mod_base = OTHER; note = 2'-O-methylguanosine-3'-phosphorothioate
  modified_base 2: mod_base = OTHER; note = 2'-O-methyladenosine-3'-phosphorothioate
  modified_base 3: mod_base = OTHER; note = 2'-O-methyladenosine-3'-phosphate
  modified_base 4: mod_base = OTHER; note = 2'-O-methyladenosine-3'-phosphate
  modified_base 5: mod_base = OTHER; note = 2'-O-methylguanosine-3'-phosphate
  modified_base 6: mod_base = OTHER; note = 2'-O-methyluridine-3'-phosphate
  modified_base 7: mod_base = OTHER; note = 2'-fluorocytidine-3'-phosphate
  modified_base 8: mod_base = OTHER; note = 2'-O-methyladenosine-3'-phosphate
  modified_base 9: mod_base = OTHER; note = 2'-fluorouridine-3'-phosphate
  modified_base 10: mod_base = OTHER; note = 2'-fluorocytidine-3'-phosphate
  modified_base 11: mod_base = OTHER; note = 2'-fluoroguanosine-3'-phosphate
  modified_base 12: mod_base = OTHER; note = 2'-O-methyladenosine-3'-phosphate
  modified_base 13: mod_base = OTHER; note = 2'-O-methylcytidine-3'-phosphate
  modified_base 14: mod_base = OTHER; note = 2'-O-methyladenosine-3'-phosphate
  modified_base 15: mod_base = OTHER; note = 2'-O-methyladenosine-3'-phosphate
  modified_base 16: mod_base = OTHER; note = 2'-O-methylguanosine-3'-phosphate
  modified_base 17: mod_base = OTHER; note = 2'-O-methyladenosine-3'-phosphate
  modified_base 18: mod_base = OTHER; note = 2'-O-methylcytidine-3'-phosphate
  modified_base 19: mod_base = OTHER; note = 2'-O-methyladenosine-3'-phosphate
  modified_base 20: mod_base = OTHER; note = 2'-O-methyluridine-3'-phosphate
  modified_base 21: mod_base = OTHER; note = 2'-O-methyluridine-3'-phosphate N-[tris(GalNAc-alkyl)-amidodecanoyl)]-4-hydroxyprolinol Hyp-(GalNAc-alkyl)3
gaaagtcatcgacaagacatt

SEQ ID NO: 2867 - RNA, 23 nt, synthetic construct
  source 1..23: mol_type = other RNA; note = Description of Artificial Sequence: Synthetic oligonucleotide
  modified_base 1: mod_base = OTHER; note = 2'-O-methyladenosine-3'-phosphorothioate
  modified_base 2: mod_base = OTHER; note = 2'-fluoroadenosine-3'-phosphorothioate
  modified_base 3: mod_base = OTHER; note = 2'-O-methyluridine-3'-phosphate
  modified_base 4: mod_base = OTHER; note = 2'-O-methylguanosine-3'-phosphate
  modified_base 5: mod_base = OTHER; note = 2'-O-methyluridine-3'-phosphate
  modified_base 6: mod_base = OTHER; note = 2'-fluorocytidine-3'-phosphate
  modified_base 7: mod_base = OTHER; note = 2'-O-methyluridine-3'-phosphate
  modified_base 8: mod_base = OTHER; note = 2'-fluorouridine-3'-phosphate
  modified_base 9: mod_base = OTHER; note = 2'-fluoroguanosine-3'-phosphate
  modified_base 10: mod_base = OTHER; note = 2'-O-methyluridine-3'-phosphate
  modified_base 11: mod_base = OTHER; note = 2'-O-methylcytidine-3'-phosphate
  modified_base 12: mod_base = OTHER; note = 2'-O-methylguanosine-3'-phosphate
  modified_base 13: mod_base = OTHER; note = 2'-O-methyladenosine-3'-phosphate
  modified_base 14: mod_base = OTHER; note = 2'-fluorouridine-3'-phosphate
  modified_base 15: mod_base = OTHER; note = 2'-O-methylguanosine-3'-phosphate
  modified_base 16: mod_base = OTHER; note = 2'-fluoroadenosine-3'-phosphate
  modified_base 17: mod_base = OTHER; note = 2'-O-methylcytidine-3'-phosphate
  modified_base 18: mod_base = OTHER; note = 2'-O-methyluridine-3'-phosphate
  modified_base 19: mod_base = OTHER; note = 2'-O-methyluridine-3'-phosphate
  modified_base 20: mod_base = OTHER; note = 2'-O-methyluridine-3'-phosphate
  modified_base 21: mod_base = OTHER; note = 2'-O-methylcytidine-3'-phosphorothioate
  modified_base 22: mod_base = OTHER; note = 2'-O-methyladenosine-3'-phosphorothioate
  modified_base 23: mod_base = OTHER; note = 2'-O-methylcytidine-3'-phosphate
aatgtcttgtcgatgactttcac

SEQ ID NO: 2868 - RNA, 21 nt, synthetic construct
  source 1..21: mol_type = other RNA; note = Description of Artificial Sequence: Synthetic oligonucleotide
  modified_base 1: mod_base = OTHER; note = 2'-O-methyladenosine-3'-phosphorothioate
  modified_base 2: mod_base = OTHER; note = 2'-O-methyladenosine-3'-phosphorothioate
  modified_base 3: mod_base = OTHER; note = 2'-O-methyladenosine-3'-phosphate
  modified_base 4: mod_base = OTHER; note = 2'-O-methylguanosine-3'-phosphate
  modified_base 5: mod_base = OTHER; note = 2'-O-methyluridine-3'-phosphate
  modified_base 6: mod_base = OTHER; note = 2'-O-methylcytidine-3'-phosphate
  modified_base 7: mod_base = OTHER; note = 2'-fluoroadenosine-3'-phosphate
  modified_base 8: mod_base = OTHER; note = 2'-O-methyluridine-3'-phosphate
  modified_base 9: mod_base = OTHER; note = 2'-fluorocytidine-3'-phosphate
  modified_base 10: mod_base = OTHER; note = 2'-fluoroguanosine-3'-phosphate
  modified_base 11: mod_base = OTHER; note = 2'-fluoroadenosine-3'-phosphate
  modified_base 12: mod_base = OTHER; note = 2'-O-methylcytidine-3'-phosphate
  modified_base 13: mod_base = OTHER; note = 2'-O-methyladenosine-3'-phosphate
  modified_base 14: mod_base = OTHER; note = 2'-O-methyladenosine-3'-phosphate
  modified_base 15: mod_base = OTHER; note = 2'-O-methylguanosine-3'-phosphate
  modified_base 16: mod_base = OTHER; note = 2'-O-methyladenosine-3'-phosphate
  modified_base 17: mod_base = OTHER; note = 2'-O-methylcytidine-3'-phosphate
  modified_base 18: mod_base = OTHER; note = 2'-O-methyladenosine-3'-phosphate
  modified_base 19: mod_base = OTHER; note = 2'-O-methyluridine-3'-phosphate
  modified_base 20: mod_base = OTHER; note = 2'-O-methyluridine-3'-phosphate
  modified_base 21: mod_base = OTHER; note = 2'-O-methylguanosine-3'-phosphate N-[tris(GalNAc-alkyl)-amidodecanoyl)]-4-hydroxyprolinol Hyp-(GalNAc-alkyl)3
aaagtcatcgacaagacattg

SEQ ID NO: 2869 - RNA, 23 nt, synthetic construct
  source 1..23: mol_type = other RNA; note = Description of Artificial Sequence: Synthetic oligonucleotide
  modified_base 1: mod_base = OTHER; note = 2'-O-methylcytidine-3'-phosphorothioate
  modified_base 2: mod_base = OTHER; note = 2'-fluoroadenosine-3'-phosphorothioate
  modified_base 3: mod_base = OTHER; note = 2'-O-methyladenosine-3'-phosphate
  modified_base 4: mod_base = OTHER; note = 2'-O-methyluridine-3'-phosphate
  modified_base 5: mod_base = OTHER; note = 2'-O-methylguanosine-3'-phosphate
  modified_base 6: mod_base = OTHER; note = 2'-fluorouridine-3'-phosphate
  modified_base 7: mod_base = OTHER; note = 2'-O-methylcytidine-3'-phosphate
  modified_base 8: mod_base = OTHER; note = 2'-fluorouridine-3'-phosphate
  modified_base 9: mod_base = OTHER; note = 2'-fluorouridine-3'-phosphate
  modified_base 10: mod_base = OTHER; note = 2'-O-methylguanosine-3'-phosphate
  modified_base 11: mod_base = OTHER; note = 2'-O-methyluridine-3'-phosphate
  modified_base 12: mod_base = OTHER; note = 2'-O-methylcytidine-3'-phosphate
  modified_base 13: mod_base = OTHER; note = 2'-O-methylguanosine-3'-phosphate
  modified_base 14: mod_base = OTHER; note = 2'-fluoroadenosine-3'-phosphate
  modified_base 15: mod_base = OTHER; note = 2'-O-methyluridine-3'-phosphate
  modified_base 16: mod_base = OTHER; note = 2'-fluoroguanosine-3'-phosphate
  modified_base 17: mod_base = OTHER; note = 2'-O-methyladenosine-3'-phosphate
  modified_base 18: mod_base = OTHER; note = 2'-O-methylcytidine-3'-phosphate
  modified_base 19: mod_base = OTHER; note = 2'-O-methyluridine-3'-phosphate
  modified_base 20: mod_base = OTHER; note = 2'-O-methyluridine-3'-phosphate
  modified_base 21: mod_base = OTHER; note = 2'-O-methyluridine-3'-phosphorothioate
  modified_base 22: mod_base = OTHER; note = 2'-O-methylcytidine-3'-phosphorothioate
  modified_base 23: mod_base = OTHER; note = 2'-O-methyladenosine-3'-phosphate
caatgtcttgtcgatgactttca

SEQ ID NO: 2870 - RNA, 21 nt, synthetic construct
  source 1..21: mol_type = other RNA; note = Description of Artificial Sequence: Synthetic oligonucleotide
  modified_base 1: mod_base = OTHER; note = 2'-O-methyladenosine-3'-phosphorothioate
  modified_base 2: mod_base = OTHER; note = 2'-O-methyluridine-3'-phosphorothioate
  modified_base 3: mod_base = OTHER; note = 2'-O-methylguanosine-3'-phosphate
  modified_base 4: mod_base = OTHER; note = 2'-O-methyluridine-3'-phosphate
  modified_base 5: mod_base = OTHER; note = 2'-O-methylguanosine-3'-phosphate
  modified_base 6: mod_base = OTHER; note = 2'-O-methyladenosine-3'-phosphate
  modified_base 7: mod_base = OTHER; note = 2'-fluoroadenosine-3'-phosphate
  modified_base 8: mod_base = OTHER; note = 2'-O-methyladenosine-3'-phosphate
  modified_base 9: mod_base = OTHER; note = 2'-fluoroguanosine-3'-phosphate
  modified_base 10: mod_base = OTHER; note = 2'-fluorouridine-3'-phosphate
  modified_base 11: mod_base = OTHER; note = 2'-fluorocytidine-3'-phosphate
  modified_base 12: mod_base = OTHER; note = 2'-O-methyladenosine-3'-phosphate
  modified_base 13: mod_base = OTHER; note = 2'-O-methyluridine-3'-phosphate
  modified_base 14: mod_base = OTHER; note = 2'-O-methylcytidine-3'-phosphate
  modified_base 15: mod_base = OTHER; note = 2'-O-methylguanosine-3'-phosphate
  modified_base 16: mod_base = OTHER; note = 2'-O-methyladenosine-3'-phosphate
  modified_base 17: mod_base = OTHER; note = 2'-O-methylcytidine-3'-phosphate
  modified_base 18: mod_base = OTHER; note = 2'-O-methyladenosine-3'-phosphate
  modified_base 19: mod_base = OTHER; note = 2'-O-methyladenosine-3'-phosphate
  modified_base 20: mod_base = OTHER; note = 2'-O-methylguanosine-3'-phosphate
  modified_base 21: mod_base = OTHER; note = 2'-O-methyladenosine-3'-phosphate N-[tris(GalNAc-alkyl)-amidodecanoyl)]-4-hydroxyprolinol Hyp-(GalNAc-alkyl)3
atgtgaaagtcatcgacaaga

SEQ ID NO: 2871 - RNA, 23 nt, synthetic construct
  source 1..23: mol_type = other RNA; note = Description of Artificial Sequence: Synthetic oligonucleotide
  modified_base 1: mod_base = OTHER; note = 2'-O-methyluridine-3'-phosphorothioate
  modified_base 2: mod_base = OTHER; note = 2'-fluorocytidine-3'-phosphorothioate
  modified_base 3: mod_base = OTHER; note = 2'-O-methyluridine-3'-phosphate
  modified_base 4: mod_base = OTHER; note = 2'-O-methyluridine-3'-phosphate
  modified_base 5: mod_base = OTHER; note = 2'-O-methylguanosine-3'-phosphate
  modified_base 6: mod_base = OTHER; note = 2'-fluorouridine-3'-phosphate
  modified_base 7: mod_base = OTHER; note = 2'-O-methylcytidine-3'-phosphate
  modified_base 8: mod_base = OTHER; note = 2'-fluoroguanosine-3'-phosphate
  modified_base 9: mod_base = OTHER; note = 2'-fluoroadenosine-3'-phosphate
  modified_base 10: mod_base = OTHER; note = 2'-O-methyluridine-3'-phosphate
  modified_base 11: mod_base = OTHER; note = 2'-O-methylguanosine-3'-phosphate
  modified_base 12: mod_base = OTHER; note = 2'-O-methyladenosine-3'-phosphate
  modified_base 13: mod_base = OTHER; note = 2'-O-methylcytidine-3'-phosphate
  modified_base 14: mod_base = OTHER; note = 2'-fluorouridine-3'-phosphate
  modified_base 15: mod_base = OTHER; note = 2'-O-methyluridine-3'-phosphate
  modified_base 16: mod_base = OTHER; note = 2'-fluorouridine-3'-phosphate
  modified_base 17: mod_base = OTHER; note = 2'-O-methylcytidine-3'-phosphate
  modified_base 18: mod_base = OTHER; note = 2'-O-methyladenosine-3'-phosphate
  modified_base 19: mod_base = OTHER; note = 2'-O-methylcytidine-3'-phosphate
  modified_base 20: mod_base = OTHER; note = 2'-O-methyladenosine-3'-phosphate
  modified_base 21: mod_base = OTHER; note = 2'-O-methyluridine-3'-phosphorothioate
  modified_base 22: mod_base = OTHER; note = 2'-O-methyluridine-3'-phosphorothioate
  modified_base 23: mod_base = OTHER; note = 2'-O-methylcytidine-3'-phosphate
tcttgtcgatgactttcacattc

SEQ ID NO: 2872 - RNA, 21 nt, synthetic construct
  source 1..21: mol_type = other RNA; note = Description of Artificial Sequence: Synthetic oligonucleotide
  modified_base 1: mod_base = OTHER; note = 2'-O-methyladenosine-3'-phosphorothioate
  modified_base 2: mod_base = OTHER; note = 2'-O-methyladenosine-3'-phosphorothioate
  modified_base 3: mod_base = OTHER; note = 2'-O-methyluridine-3'-phosphate
  modified_base 4: mod_base = OTHER; note = 2'-O-methylguanosine-3'-phosphate
  modified_base 5: mod_base = OTHER; note = 2'-O-methyluridine-3'-phosphate
  modified_base 6: mod_base = OTHER; note = 2'-O-methylguanosine-3'-phosphate
  modified_base 7: mod_base = OTHER; note = 2'-fluoroadenosine-3'-phosphate
  modified_base 8: mod_base = OTHER; note = 2'-O-methyladenosine-3'-phosphate
  modified_base 9: mod_base = OTHER; note = 2'-fluoroadenosine-3'-phosphate
  modified_base 10: mod_base = OTHER; note = 2'-fluoroguanosine-3'-phosphate
  modified_base 11: mod_base = OTHER; note = 2'-fluorouridine-3'-phosphate
  modified_base 12: mod_base = OTHER; note = 2'-O-methylcytidine-3'-phosphate
  modified_base 13: mod_base = OTHER; note = 2'-O-methyladenosine-3'-phosphate
  modified_base 14: mod_base = OTHER; note = 2'-O-methyluridine-3'-phosphate
  modified_base 15: mod_base = OTHER; note = 2'-O-methylcytidine-3'-phosphate
  modified_base 16: mod_base = OTHER; note = 2'-O-methylguanosine-3'-phosphate
  modified_base 17: mod_base = OTHER; note = 2'-O-methyladenosine-3'-phosphate
  modified_base 18: mod_base = OTHER; note = 2'-O-methylcytidine-3'-phosphate
  modified_base 19: mod_base = OTHER; note = 2'-O-methyladenosine-3'-phosphate
  modified_base 20: mod_base = OTHER; note = 2'-O-methyladenosine-3'-phosphate
  modified_base 21: mod_base = OTHER; note = 2'-O-methylguanosine-3'-phosphate N-[tris(GalNAc-alkyl)-amidodecanoyl)]-4-hydroxyprolinol Hyp-(GalNAc-alkyl)3
aatgtgaaagtcatcgacaag

SEQ ID NO: 2873 - RNA, 23 nt, synthetic construct
  source 1..23: mol_type = other RNA; note = Description of Artificial Sequence: Synthetic oligonucleotide
  modified_base 1: mod_base = OTHER; note = 2'-O-methylcytidine-3'-phosphorothioate
  modified_base 2: mod_base = OTHER; note = 2'-fluorouridine -3'-phosphorothioate
  modified_base 3: mod_base = OTHER; note = 2'-O-methyluridine-3'-phosphate
  modified_base 4: mod_base = OTHER; note = 2'-O-methylguanosine-3'-phosphate
  modified_base 5: mod_base = OTHER; note = 2'-O-methyluridine-3'-phosphate
  modified_base 6: mod_base = OTHER; note = 2'-fluorocytidine-3'-phosphate
  modified_base 7: mod_base = OTHER; note = 2'-O-methylguanosine-3'-phosphate
  modified_base 8: mod_base = OTHER; note = 2'-fluoroadenosine-3'-phosphate
  modified_base 9: mod_base = OTHER; note = 2'-fluorouridine-3'-phosphate
  modified_base 10: mod_base = OTHER; note = 2'-O-methylguanosine-3'-phosphate
  modified_base 11: mod_base = OTHER; note = 2'-O-methyladenosine-3'-phosphate
  modified_base 12: mod_base = OTHER; note = 2'-O-methylcytidine-3'-phosphate
  modified_base 13: mod_base = OTHER; note = 2'-O-methyluridine-3'-phosphate
  modified_base 14: mod_base = OTHER; note = 2'-fluorouridine-3'-phosphate
  modified_base 15: mod_base = OTHER; note = 2'-O-methyluridine-3'-phosphate
  modified_base 16: mod_base = OTHER; note = 2'-fluorocytidine-3'-phosphate
  modified_base 17: mod_base = OTHER; note = 2'-O-methyladenosine-3'-phosphate
  modified_base 18: mod_base = OTHER; note = 2'-O-methylcytidine-3'-phosphate
  modified_base 19: mod_base = OTHER; note = 2'-O-methyladenosine-3'-phosphate
  modified_base 20: mod_base = OTHER; note = 2'-O-methyluridine-3'-phosphate
  modified_base 21: mod_base = OTHER; note = 2'-O-methyluridine-3'-phosphorothioate
  modified_base 22: mod_base = OTHER; note = 2'-O-methylcytidine-3'-phosphorothioate
  modified_base 23: mod_base = OTHER; note = 2'-O-methyluridine-3'-phosphate
cttgtcgatgactttcacattct

SEQ ID NO: 2874 - RNA, 21 nt, synthetic construct
  source 1..21: mol_type = other RNA; note = Description of Artificial Sequence: Synthetic oligonucleotide
  modified_base 1: mod_base = OTHER; note = 2'-O-methylguanosine-3'-phosphorothioate
  modified_base 2: mod_base = OTHER; note = 2'-O-methylguanosine-3'-phosphorothioate
  modified_base 3: mod_base = OTHER; note = 2'-O-methylcytidine-3'-phosphate
  modified_base 4: mod_base = OTHER; note = 2'-O-methyluridine-3'-phosphate
  modified_base 5: mod_base = OTHER; note = 2'-O-methyladenosine-3'-phosphate
  modified_base 6: mod_base = OTHER; note = 2'-O-methyladenosine-3'-phosphate
  modified_base 7: mod_base = OTHER; note = 2'-fluorouridine-3'-phosphate
  modified_base 8: mod_base = OTHER; note = 2'-O-methyluridine-3'-phosphate
  modified_base 9: mod_base = OTHER; note = 2'-fluorouridine-3'-phosphate
  modified_base 10: mod_base = OTHER; note = 2'-fluoroguanosine-3'-phosphate
  modified_base 11: mod_base = OTHER; note = 2'-fluorouridine-3'-phosphate
  modified_base 12: mod_base = OTHER; note = 2'-O-methyladenosine-3'-phosphate
  modified_base 13: mod_base = OTHER; note = 2'-O-methyluridine-3'-phosphate
  modified_base 14: mod_base = OTHER; note = 2'-O-methylcytidine-3'-phosphate
  modified_base 15: mod_base = OTHER; note = 2'-O-methyladenosine-3'-phosphate
  modified_base 16: mod_base = OTHER; note = 2'-O-methyladenosine-3'-phosphate
  modified_base 17: mod_base = OTHER; note = 2'-O-methyluridine-3'-phosphate
  modified_base 18: mod_base = OTHER; note = 2'-O-methylguanosine-3'-phosphate
  modified_base 19: mod_base = OTHER; note = 2'-O-methyladenosine-3'-phosphate
  modified_base 20: mod_base = OTHER; note = 2'-O-methyluridine-3'-phosphate
  modified_base 21: mod_base = OTHER; note = 2'-O-methyluridine-3'-phosphate N-[tris(GalNAc-alkyl)-amidodecanoyl)]-4-hydroxyprolinol Hyp-(GalNAc-alkyl)3
ggctaatttgtatcaatgatt

SEQ ID NO: 2875 - RNA, 23 nt, synthetic construct
  source 1..23: mol_type = other RNA; note = Description of Artificial Sequence: Synthetic oligonucleotide
  modified_base 1: mod_base = OTHER; note = 2'-O-methyladenosine-3'-phosphorothioate
  modified_base 2: mod_base = OTHER; note = 2'-fluoroadenosine-3'-phosphorothioate
  modified_base 3: mod_base = OTHER; note = 2'-O-methyluridine-3'-phosphate
  modified_base 4: mod_base = OTHER; note = 2'-O-methylcytidine-3'-phosphate
  modified_base 5: mod_base = OTHER; note = 2'-O-methyladenosine-3'-phosphate
  modified_base 6: mod_base = OTHER; note = 2'-fluorouridine-3'-phosphate
  modified_base 7: mod_base = OTHER; note = 2'-O-methyluridine-3'-phosphate
  modified_base 8: mod_base = OTHER; note = 2'-fluoroguanosine-3'-phosphate
  modified_base 9: mod_base = OTHER; note = 2'-fluoroadenosine-3'-phosphate
  modified_base 10: mod_base = OTHER; note = 2'-O-methyluridine-3'-phosphate
  modified_base 11: mod_base = OTHER; note = 2'-O-methyladenosine-3'-phosphate
  modified_base 12: mod_base = OTHER; note = 2'-O-methylcytidine-3'-phosphate
  modified_base 13: mod_base = OTHER; note = 2'-O-methyladenosine-3'-phosphate
  modified_base 14: mod_base = OTHER; note = 2'-fluoroadenosine-3'-phosphate
  modified_base 15: mod_base = OTHER; note = 2'-O-methyladenosine-3'-phosphate
  modified_base 16: mod_base = OTHER; note = 2'-fluorouridine-3'-phosphate
  modified_base 17: mod_base = OTHER; note = 2'-O-methyluridine-3'-phosphate
  modified_base 18: mod_base = OTHER; note = 2'-O-methyladenosine-3'-phosphate
  modified_base 19: mod_base = OTHER; note = 2'-O-methylguanosine-3'-phosphate
  modified_base 20: mod_base = OTHER; note = 2'-O-methylcytidine-3'-phosphate
  modified_base 21: mod_base = OTHER; note = 2'-O-methylcytidine-3'-phosphorothioate
  modified_base 22: mod_base = OTHER; note = 2'-O-methylguanosine-3'-phosphorothioate
  modified_base 23: mod_base = OTHER; note = 2'-O-methylguanosine-3'-phosphate
aatcattgatacaaattagccgg

SEQ ID NO: 2876 - RNA, 21 nt, synthetic construct
  source 1..21: mol_type = other RNA; note = Description of Artificial Sequence: Synthetic oligonucleotide
  modified_base 1: mod_base = OTHER; note = 2'-O-methylguanosine-3'-phosphorothioate
  modified_base 2: mod_base = OTHER; note = 2'-O-methylcytidine-3'-phosphorothioate
  modified_base 3: mod_base = OTHER; note = 2'-O-methyluridine-3'-phosphate
  modified_base 4: mod_base = OTHER; note = 2'-O-methyladenosine-3'-phosphate
  modified_base 5: mod_base = OTHER; note = 2'-O-methyladenosine-3'-phosphate
  modified_base 6: mod_base = OTHER; note = 2'-O-methyluridine-3'-phosphate
  modified_base 7: mod_base = OTHER; note = 2'-fluorouridine-3'-phosphate
  modified_base 8: mod_base = OTHER; note = 2'-O-methyluridine-3'-phosphate
  modified_base 9: mod_base = OTHER; note = 2'-fluoroguanosine-3'-phosphate
  modified_base 10: mod_base = OTHER; note = 2'-fluorouridine-3'-phosphate
  modified_base 11: mod_base = OTHER; note = 2'-fluoroadenosine-3'-phosphate
  modified_base 12: mod_base = OTHER; note = 2'-O-methyluridine-3'-phosphate
  modified_base 13: mod_base = OTHER; note = 2'-O-methylcytidine-3'-phosphate
  modified_base 14: mod_base = OTHER; note = 2'-O-methyladenosine-3'-phosphate
  modified_base 15: mod_base = OTHER; note = 2'-O-methyladenosine-3'-phosphate
  modified_base 16: mod_base = OTHER; note = 2'-O-methyluridine-3'-phosphate
  modified_base 17: mod_base = OTHER; note = 2'-O-methylguanosine-3'-phosphate
  modified_base 18: mod_base = OTHER; note = 2'-O-methyladenosine-3'-phosphate
  modified_base 19: mod_base = OTHER; note = 2'-O-methyluridine-3'-phosphate
  modified_base 20: mod_base = OTHER; note = 2'-O-methyluridine-3'-phosphate
  modified_base 21: mod_base = OTHER; note = 2'-O-methyladenosine-3'-phosphate N-[tris(GalNAc-alkyl)-amidodecanoyl)]-4-hydroxyprolinol Hyp-(GalNAc-alkyl)3
gctaatttgtatcaatgatta

SEQ ID NO: 2877 - RNA, 23 nt, synthetic construct
  source 1..23: mol_type = other RNA; note = Description of Artificial Sequence: Synthetic oligonucleotide
  modified_base 1: mod_base = OTHER; note = 2'-O-methyluridine-3'-phosphorothioate
  modified_base 2: mod_base = OTHER; note = 2'-fluoroadenosine-3'-phosphorothioate
  modified_base 3: mod_base = OTHER; note = 2'-O-methyladenosine-3'-phosphate
  modified_base 4: mod_base = OTHER; note = 2'-O-methyluridine-3'-phosphate
  modified_base 5: mod_base = OTHER; note = 2'-O-methylcytidine-3'-phosphate
  modified_base 6: mod_base = OTHER; note = 2'-fluoroadenosine-3'-phosphate
  modified_base 7: mod_base = OTHER; note = 2'-O-methyluridine-3'-phosphate
  modified_base 8: mod_base = OTHER; note = 2'-fluorouridine-3'-phosphate
  modified_base 9: mod_base = OTHER; note = 2'-fluoroguanosine-3'-phosphate
  modified_base 10: mod_base = OTHER; note = 2'-O-methyladenosine-3'-phosphate
  modified_base 11: mod_base = OTHER; note = 2'-O-methyluridine-3'-phosphate
  modified_base 12: mod_base = OTHER; note = 2'-O-methyladenosine-3'-phosphate
  modified_base 13: mod_base = OTHER; note = 2'-O-methylcytidine-3'-phosphate
  modified_base 14: mod_base = OTHER; note = 2'-fluoroadenosine-3'-phosphate
  modified_base 15: mod_base = OTHER; note = 2'-O-methyladenosine-3'-phosphate
  modified_base 16: mod_base = OTHER; note = 2'-fluoroadenosine-3'-phosphate
  modified_base 17: mod_base = OTHER; note = 2'-O-methyluridine-3'-phosphate
  modified_base 18: mod_base = OTHER; note = 2'-O-methyluridine-3'-phosphate
  modified_base 19: mod_base = OTHER; note = 2'-O-methyladenosine-3'-phosphate
  modified_base 20: mod_base = OTHER; note = 2'-O-methylguanosine-3'-phosphate
  modified_base 21: mod_base = OTHER; note = 2'-O-methylcytidine-3'-phosphorothioate
  modified_base 22: mod_base = OTHER; note = 2'-O-methylcytidine-3'-phosphorothioate
  modified_base 23: mod_base = OTHER; note = 2'-O-methylguanosine-3'-phosphate
taatcattgatacaaattagccg

SEQ ID NO: 2878 - RNA, 21 nt, synthetic construct
  source 1..21: mol_type = other RNA; note = Description of Artificial Sequence: Synthetic oligonucleotide
  modified_base 1: mod_base = OTHER; note = 2'-O-methylcytidine-3'-phosphorothioate
  modified_base 2: mod_base = OTHER; note = 2'-O-methylcytidine-3'-phosphorothioate
  modified_base 3: mod_base = OTHER; note = 2'-O-methylcytidine-3'-phosphate
  modified_base 4: mod_base = OTHER; note = 2'-O-methylcytidine-3'-phosphate
  modified_base 5: mod_base = OTHER; note = 2'-O-methylguanosine-3'-phosphate
  modified_base 6: mod_base = OTHER; note = 2'-O-methylguanosine-3'-phosphate
  modified_base 7: mod_base = OTHER; note = 2'-fluorocytidine-3'-phosphate
  modified_base 8: mod_base = OTHER; note = 2'-O-methyluridine-3'-phosphate
  modified_base 9: mod_base = OTHER; note = 2'-fluoroadenosine-3'-phosphate
  modified_base 10: mod_base = OTHER; note = 2'-fluoroadenosine-3'-phosphate
  modified_base 11: mod_base = OTHER; note = 2'-fluorouridine-3'-phosphate
  modified_base 12: mod_base = OTHER; note = 2'-O-methyluridine-3'-phosphate
  modified_base 13: mod_base = OTHER; note = 2'-O-methyluridine-3'-phosphate
  modified_base 14: mod_base = OTHER; note = 2'-O-methylguanosine-3'-phosphate
  modified_base 15: mod_base = OTHER; note = 2'-O-methyluridine-3'-phosphate
  modified_base 16: mod_base = OTHER; note = 2'-O-methyladenosine-3'-phosphate
  modified_base 17: mod_base = OTHER; note = 2'-O-methyluridine-3'-phosphate
  modified_base 18: mod_base = OTHER; note = 2'-O-methylcytidine-3'-phosphate
  modified_base 19: mod_base = OTHER; note = 2'-O-methyladenosine-3'-phosphate
  modified_base 20: mod_base = OTHER; note = 2'-O-methyladenosine-3'-phosphate
  modified_base 21: mod_base = OTHER; note = 2'-O-methyluridine-3'-phosphate N-[tris(GalNAc-alkyl)-amidodecanoyl)]-4-hydroxyprolinol Hyp-(GalNAc-alkyl)3
ccccggctaatttgtatcaat

SEQ ID NO: 2879 - RNA, 23 nt, synthetic construct
  source 1..23: mol_type = other RNA; note = Description of Artificial Sequence: Synthetic oligonucleotide
  modified_base 1: mod_base = OTHER; note = 2'-O-methyladenosine-3'-phosphorothioate
  modified_base 2: mod_base = OTHER; note = 2'-fluorouridine -3'-phosphorothioate
  modified_base 3: mod_base = OTHER; note = 2'-O-methyluridine-3'-phosphate
  modified_base 4: mod_base = OTHER; note = 2'-O-methylguanosine-3'-phosphate
  modified_base 5: mod_base = OTHER; note = 2'-O-methyladenosine-3'-phosphate
  modified_base 6: mod_base = OTHER; note = 2'-fluorouridine-3'-phosphate
  modified_base 7: mod_base = OTHER; note = 2'-O-methyladenosine-3'-phosphate
  modified_base 8: mod_base = OTHER; note = 2'-fluorocytidine-3'-phosphate
  modified_base 9: mod_base = OTHER; note = 2'-fluoroadenosine-3'-phosphate
  modified_base 10: mod_base = OTHER; note = 2'-O-methyladenosine-3'-phosphate
  modified_base 11: mod_base = OTHER; note = 2'-O-methyladenosine-3'-phosphate
  modified_base 12: mod_base = OTHER; note = 2'-O-methyluridine-3'-phosphate
  modified_base 13: mod_base = OTHER; note = 2'-O-methyluridine-3'-phosphate
  modified_base 14: mod_base = OTHER; note = 2'-fluoroadenosine-3'-phosphate
  modified_base 15: mod_base = OTHER; note = 2'-O-methylguanosine-3'-phosphate
  modified_base 16: mod_base = OTHER; note = 2'-fluorocytidine-3'-phosphate
  modified_base 17: mod_base = OTHER; note = 2'-O-methylcytidine-3'-phosphate
  modified_base 18: mod_base = OTHER; note = 2'-O-methylguanosine-3'-phosphate
  modified_base 19: mod_base = OTHER; note = 2'-O-methylguanosine-3'-phosphate
  modified_base 20: mod_base = OTHER; note = 2'-O-methylguanosine-3'-phosphate
  modified_base 21: mod_base = OTHER; note = 2'-O-methylguanosine-3'-phosphorothioate
  modified_base 22: mod_base = OTHER; note = 2'-O-methylguanosine-3'-phosphorothioate
  modified_base 23: mod_base = OTHER; note = 2'-O-methyladenosine-3'-phosphate
attgatacaaattagccggggga

SEQ ID NO: 2880 - RNA, 21 nt, synthetic construct
  source 1..21: mol_type = other RNA; note = Description of Artificial Sequence: Synthetic oligonucleotide
  modified_base 1: mod_base = OTHER; note = 2'-O-methylcytidine-3'-phosphorothioate
  modified_base 2: mod_base = OTHER; note = 2'-O-methylcytidine-3'-phosphorothioate
  modified_base 3: mod_base = OTHER; note = 2'-O-methylcytidine-3'-phosphate
  modified_base 4: mod_base = OTHER; note = 2'-O-methylcytidine-3'-phosphate
  modified_base 5: mod_base = OTHER; note = 2'-O-methylcytidine-3'-phosphate
  modified_base 6: mod_base = OTHER; note = 2'-O-methylguanosine-3'-phosphate
  modified_base 7: mod_base = OTHER; note = 2'-fluoroguanosine-3'-phosphate
  modified_base 8: mod_base = OTHER; note = 2'-O-methylcytidine-3'-phosphate
  modified_base 9: mod_base = OTHER; note = 2'-fluorouridine-3'-phosphate
  modified_base 10: mod_base = OTHER; note = 2'-fluoroadenosine-3'-phosphate
  modified_base 11: mod_base = OTHER; note = 2'-fluoroadenosine-3'-phosphate
  modified_base 12: mod_base = OTHER; note = 2'-O-methyluridine-3'-phosphate
  modified_base 13: mod_base = OTHER; note = 2'-O-methyluridine-3'-phosphate
  modified_base 14: mod_base = OTHER; note = 2'-O-methyluridine-3'-phosphate
  modified_base 15: mod_base = OTHER; note = 2'-O-methylguanosine-3'-phosphate
  modified_base 16: mod_base = OTHER; note = 2'-O-methyluridine-3'-phosphate
  modified_base 17: mod_base = OTHER; note = 2'-O-methyladenosine-3'-phosphate
  modified_base 18: mod_base = OTHER; note = 2'-O-methyluridine-3'-phosphate
  modified_base 19: mod_base = OTHER; note = 2'-O-methylcytidine-3'-phosphate
  modified_base 20: mod_base = OTHER; note = 2'-O-methyladenosine-3'-phosphate
  modified_base 21: mod_base = OTHER; note = 2'-O-methyladenosine-3'-phosphate N-[tris(GalNAc-alkyl)-amidodecanoyl)]-4-hydroxyprolinol Hyp-(GalNAc-alkyl)3
cccccggctaatttgtatcaa

SEQ ID NO: 2881 - RNA, 23 nt, synthetic construct
  source 1..23: mol_type = other RNA; note = Description of Artificial Sequence: Synthetic oligonucleotide
  modified_base 1: mod_base = OTHER; note = 2'-O-methyluridine-3'-phosphorothioate
  modified_base 2: mod_base = OTHER; note = 2'-fluorouridine -3'-phosphorothioate
  modified_base 3: mod_base = OTHER; note = 2'-O-methylguanosine-3'-phosphate
  modified_base 4: mod_base = OTHER; note = 2'-O-methyladenosine-3'-phosphate
  modified_base 5: mod_base = OTHER; note = 2'-O-methyluridine-3'-phosphate
  modified_base 6: mod_base = OTHER; note = 2'-fluoroadenosine-3'-phosphate
  modified_base 7: mod_base = OTHER; note = 2'-O-methylcytidine-3'-phosphate
  modified_base 8: mod_base = OTHER; note = 2'-fluoroadenosine-3'-phosphate
  modified_base 9: mod_base = OTHER; note = 2'-fluoroadenosine-3'-phosphate
  modified_base 10: mod_base = OTHER; note = 2'-O-methyladenosine-3'-phosphate
  modified_base 11: mod_base = OTHER; note = 2'-O-methyluridine-3'-phosphate
  modified_base 12: mod_base = OTHER; note = 2'-O-methyluridine-3'-phosphate
  modified_base 13: mod_base = OTHER; note = 2'-O-methyladenosine-3'-phosphate
  modified_base 14: mod_base = OTHER; note = 2'-fluoroguanosine-3'-phosphate
  modified_base 15: mod_base = OTHER; note = 2'-O-methylcytidine-3'-phosphate
  modified_base 16: mod_base = OTHER; note = 2'-fluorocytidine-3'-phosphate
  modified_base 17: mod_base = OTHER; note = 2'-O-methylguanosine-3'-phosphate
  modified_base 18: mod_base = OTHER; note = 2'-O-methylguanosine-3'-phosphate
  modified_base 19: mod_base = OTHER; note = 2'-O-methylguanosine-3'-phosphate
  modified_base 20: mod_base = OTHER; note = 2'-O-methylguanosine-3'-phosphate
  modified_base 21: mod_base = OTHER; note = 2'-O-methylguanosine-3'-phosphorothioate
  modified_base 22: mod_base = OTHER; note = 2'-O-methyladenosine-3'-phosphorothioate
  modified_base 23: mod_base = OTHER; note = 2'-O-methylguanosine-3'-phosphate
ttgatacaaattagccgggggag

SEQ ID NO: 2882 - RNA, 21 nt, synthetic construct
  source 1..21: mol_type = other RNA; note = Description of Artificial Sequence: Synthetic oligonucleotide
  modified_base 1: mod_base = OTHER; note = 2'-O-methyluridine-3'-phosphorothioate
  modified_base 2: mod_base = OTHER; note = 2'-O-methylguanosine-3'-phosphorothioate
  modified_base 3: mod_base = OTHER; note = 2'-O-methyluridine-3'-phosphate
  modified_base 4: mod_base = OTHER; note = 2'-O-methylcytidine-3'-phosphate
  modified_base 5: mod_base = OTHER; note = 2'-O-methylguanosine-3'-phosphate
  modified_base 6: mod_base = OTHER; note = 2'-O-methyladenosine-3'-phosphate
  modified_base 7: mod_base = OTHER; note = 2'-fluorocytidine-3'-phosphate
  modified_base 8: mod_base = OTHER; note = 2'-O-methyluridine-3'-phosphate
  modified_base 9: mod_base = OTHER; note = 2'-fluorouridine-3'-phosphate
  modified_base 10: mod_base = OTHER; note = 2'-fluorocytidine-3'-phosphate
  modified_base 11: mod_base = OTHER; note = 2'-fluorouridine-3'-phosphate
  modified_base 12: mod_base = OTHER; note = 2'-O-methylguanosine-3'-phosphate
  modified_base 13: mod_base = OTHER; note = 2'-O-methyluridine-3'-phosphate
  modified_base 14: mod_base = OTHER; note = 2'-O-methyluridine-3'-phosphate
  modified_base 15: mod_base = OTHER; note = 2'-O-methyluridine-3'-phosphate
  modified_base 16: mod_base = OTHER; note = 2'-O-methyluridine-3'-phosphate
  modified_base 17: mod_base = OTHER; note = 2'-O-methyladenosine-3'-phosphate
  modified_base 18: mod_base = OTHER; note = 2'-O-methylguanosine-3'-phosphate
  modified_base 19: mod_base = OTHER; note = 2'-O-methylguanosine-3'-phosphate
  modified_base 20: mod_base = OTHER; note = 2'-O-methyladenosine-3'-phosphate
  modified_base 21: mod_base = OTHER; note = 2'-O-methylcytidine-3'-phosphate N-[tris(GalNAc-alkyl)-amidodecanoyl)]-4-hydroxyprolinol Hyp-(GalNAc-alkyl)3
tgtcgacttctgttttaggac

SEQ ID NO: 2883 - RNA, 23 nt, synthetic construct
  source 1..23: mol_type = other RNA; note = Description of Artificial Sequence: Synthetic oligonucleotide
  modified_base 1: mod_base = OTHER; note = 2'-O-methylguanosine-3'-phosphorothioate
  modified_base 2: mod_base = OTHER; note = 2'-fluorouridine -3'-phosphorothioate
  modified_base 3: mod_base = OTHER; note = 2'-O-methylcytidine-3'-phosphate
  modified_base 4: mod_base = OTHER; note = 2'-O-methylcytidine-3'-phosphate
  modified_base 5: mod_base = OTHER; note = 2'-O-methyluridine-3'-phosphate
  modified_base 6: mod_base = OTHER; note = 2'-fluoroadenosine-3'-phosphate
  modified_base 7: mod_base = OTHER; note = 2'-O-methyladenosine-3'-phosphate
  modified_base 8: mod_base = OTHER; note = 2'-fluoroadenosine-3'-phosphate
  modified_base 9: mod_base = OTHER; note = 2'-fluoroadenosine-3'-phosphate
  modified_base 10: mod_base = OTHER; note = 2'-O-methylcytidine-3'-phosphate
  modified_base 11: mod_base = OTHER; note = 2'-O-methyladenosine-3'-phosphate
  modified_base 12: mod_base = OTHER; note = 2'-O-methylguanosine-3'-phosphate
  modified_base 13: mod_base = OTHER; note = 2'-O-methyladenosine-3'-phosphate
  modified_base 14: mod_base = OTHER; note = 2'-fluoroadenosine-3'-phosphate
  modified_base 15: mod_base = OTHER; note = 2'-O-methylguanosine-3'-phosphate
  modified_base 16: mod_base = OTHER; note = 2'-fluorouridine-3'-phosphate
  modified_base 17: mod_base = OTHER; note = 2'-O-methylcytidine-3'-phosphate
  modified_base 18: mod_base = OTHER; note = 2'-O-methylguanosine-3'-phosphate
  modified_base 19: mod_base = OTHER; note = 2'-O-methyladenosine-3'-phosphate
  modified_base 20: mod_base = OTHER; note = 2'-O-methylcytidine-3'-phosphate
  modified_base 21: mod_base = OTHER; note = 2'-O-methyladenosine-3'-phosphorothioate
  modified_base 22: mod_base = OTHER; note = 2'-O-methylguanosine-3'-phosphorothioate
  modified_base 23: mod_base = OTHER; note = 2'-O-methyladenosine-3'-phosphate
gtcctaaaacagaagtcgacaga

SEQ ID NO: 2884 - RNA, 21 nt, synthetic construct
  source 1..21: mol_type = other RNA; note = Description of Artificial Sequence: Synthetic oligonucleotide
  modified_base 1: mod_base = OTHER; note = 2'-O-methylguanosine-3'-phosphorothioate
  modified_base 2: mod_base = OTHER; note = 2'-O-methyluridine-3'-phosphorothioate
  modified_base 3: mod_base = OTHER; note = 2'-O-methylcytidine-3'-phosphate
  modified_base 4: mod_base = OTHER; note = 2'-O-methylguanosine-3'-phosphate
  modified_base 5: mod_base = OTHER; note = 2'-O-methyladenosine-3'-phosphate
  modified_base 6: mod_base = OTHER; note = 2'-O-methylcytidine-3'-phosphate
  modified_base 7: mod_base = OTHER; note = 2'-fluorouridine-3'-phosphate
  modified_base 8: mod_base = OTHER; note = 2'-O-methyluridine-3'-phosphate
  modified_base 9: mod_base = OTHER; note = 2'-fluorocytidine-3'-phosphate
  modified_base 10: mod_base = OTHER; note = 2'-fluorouridine-3'-phosphate
  modified_base 11: mod_base = OTHER; note = 2'-fluoroguanosine-3'-phosphate
  modified_base 12: mod_base = OTHER; note = 2'-O-methyluridine-3'-phosphate
  modified_base 13: mod_base = OTHER; note = 2'-O-methyluridine-3'-phosphate
  modified_base 14: mod_base = OTHER; note = 2'-O-methyluridine-3'-phosphate
  modified_base 15: mod_base = OTHER; note = 2'-O-methyluridine-3'-phosphate
  modified_base 16: mod_base = OTHER; note = 2'-O-methyladenosine-3'-phosphate
  modified_base 17: mod_base = OTHER; note = 2'-O-methylguanosine-3'-phosphate
  modified_base 18: mod_base = OTHER; note = 2'-O-methylguanosine-3'-phosphate
  modified_base 19: mod_base = OTHER; note = 2'-O-methyladenosine-3'-phosphate
  modified_base 20: mod_base = OTHER; note = 2'-O-methylcytidine-3'-phosphate
  modified_base 21: mod_base = OTHER; note = 2'-O-methyladenosine-3'-phosphate N-[tris(GalNAc-alkyl)-amidodecanoyl)]-4-hydroxyprolinol Hyp-(GalNAc-alkyl)3
gtcgacttctgttttaggaca

SEQ ID NO: 2885 - RNA, 23 nt, synthetic construct
  source 1..23: mol_type = other RNA; note = Description of Artificial Sequence: Synthetic oligonucleotide
  modified_base 1: mod_base = OTHER; note = 2'-O-methyluridine-3'-phosphorothioate
  modified_base 2: mod_base = OTHER; note = 2'-fluoroguanosine-3'-phosphorothioate
  modified_base 3: mod_base = OTHER; note = 2'-O-methyluridine-3'-phosphate
  modified_base 4: mod_base = OTHER; note = 2'-O-methylcytidine-3'-phosphate
  modified_base 5: mod_base = OTHER; note = 2'-O-methylcytidine-3'-phosphate
  modified_base 6: mod_base = OTHER; note = 2'-fluorouridine-3'-phosphate
  modified_base 7: mod_base = OTHER; note = 2'-O-methyladenosine-3'-phosphate
  modified_base 8: mod_base = OTHER; note = 2'-fluoroadenosine-3'-phosphate
  modified_base 9: mod_base = OTHER; note = 2'-fluoroadenosine-3'-phosphate
  modified_base 10: mod_base = OTHER; note = 2'-O-methyladenosine-3'-phosphate
  modified_base 11: mod_base = OTHER; note = 2'-O-methylcytidine-3'-phosphate
  modified_base 12: mod_base = OTHER; note = 2'-O-methyladenosine-3'-phosphate
  modified_base 13: mod_base = OTHER; note = 2'-O-methylguanosine-3'-phosphate
  modified_base 14: mod_base = OTHER; note = 2'-fluoroadenosine-3'-phosphate
  modified_base 15: mod_base = OTHER; note = 2'-O-methyladenosine-3'-phosphate
  modified_base 16: mod_base = OTHER; note = 2'-fluoroguanosine-3'-phosphate
  modified_base 17: mod_base = OTHER; note = 2'-O-methyluridine-3'-phosphate
  modified_base 18: mod_base = OTHER; note = 2'-O-methylcytidine-3'-phosphate
  modified_base 19: mod_base = OTHER; note = 2'-O-methylguanosine-3'-phosphate
  modified_base 20: mod_base = OTHER; note = 2'-O-methyladenosine-3'-phosphate
  modified_base 21: mod_base = OTHER; note = 2'-O-methylcytidine-3'-phosphorothioate
  modified_base 22: mod_base = OTHER; note = 2'-O-methyladenosine-3'-phosphorothioate
  modified_base 23: mod_base = OTHER; note = 2'-O-methylguanosine-3'-phosphate
tgtcctaaaacagaagtcgacag

SEQ ID NO: 2886 - RNA, 21 nt, synthetic construct
  source 1..21: mol_type = other RNA; note = Description of Artificial Sequence: Synthetic oligonucleotide
  modified_base 1: mod_base = OTHER; note = 2'-O-methylguanosine-3'-phosphorothioate
  modified_base 2: mod_base = OTHER; note = 2'-O-methyladenosine-3'-phosphorothioate
  modified_base 3: mod_base = OTHER; note = 2'-O-methyluridine-3'-phosphate
  modified_base 4: mod_base = OTHER; note = 2'-O-methylcytidine-3'-phosphate
  modified_base 5: mod_base = OTHER; note = 2'-O-methyluridine-3'-phosphate
  modified_base 6: mod_base = OTHER; note = 2'-O-methylguanosine-3'-phosphate
  modified_base 7: mod_base = OTHER; note = 2'-fluorouridine-3'-phosphate
  modified_base 8: mod_base = OTHER; note = 2'-O-methylcytidine-3'-phosphate
  modified_base 9: mod_base = OTHER; note = 2'-fluoroguanosine-3'-phosphate
  modified_base 10: mod_base = OTHER; note = 2'-fluoroadenosine-3'-phosphate
  modified_base 11: mod_base = OTHER; note = 2'-fluorocytidine-3'-phosphate
  modified_base 12: mod_base = OTHER; note = 2'-O-methyluridine-3'-phosphate
  modified_base 13: mod_base = OTHER; note = 2'-O-methyluridine-3'-phosphate
  modified_base 14: mod_base = OTHER; note = 2'-O-methylcytidine-3'-phosphate
  modified_base 15: mod_base = OTHER; note = 2'-O-methyluridine-3'-phosphate
  modified_base 16: mod_base = OTHER; note = 2'-O-methylguanosine-3'-phosphate
  modified_base 17: mod_base = OTHER; note = 2'-O-methyluridine-3'-phosphate
  modified_base 18: mod_base = OTHER; note = 2'-O-methyluridine-3'-phosphate
  modified_base 19: mod_base = OTHER; note = 2'-O-methyluridine-3'-phosphate
  modified_base 20: mod_base = OTHER; note = 2'-O-methyluridine-3'-phosphate
  modified_base 21: mod_base = OTHER; note = 2'-O-methyladenosine-3'-phosphate N-[tris(GalNAc-alkyl)-amidodecanoyl)]-4-hydroxyprolinol Hyp-(GalNAc-alkyl)3
gatctgtcgacttctgtttta

SEQ ID NO: 2887 - RNA, 23 nt, synthetic construct
  source 1..23: mol_type = other RNA; note = Description of Artificial Sequence: Synthetic oligonucleotide
  modified_base 1: mod_base = OTHER; note = 2'-O-methyluridine-3'-phosphorothioate
  modified_base 2: mod_base = OTHER; note = 2'-fluoroadenosine-3'-phosphorothioate
  modified_base 3: mod_base = OTHER; note = 2'-O-methyladenosine-3'-phosphate
  modified_base 4: mod_base = OTHER; note = 2'-O-methyladenosine-3'-phosphate
  modified_base 5: mod_base = OTHER; note = 2'-O-methyladenosine-3'-phosphate
  modified_base 6: mod_base = OTHER; note = 2'-fluorocytidine-3'-phosphate
  modified_base 7: mod_base = OTHER; note = 2'-O-methyladenosine-3'-phosphate
  modified_base 8: mod_base = OTHER; note = 2'-fluoroguanosine-3'-phosphate
  modified_base 9: mod_base = OTHER; note = 2'-fluoroadenosine-3'-phosphate
  modified_base 10: mod_base = OTHER; note = 2'-O-methyladenosine-3'-phosphate
  modified_base 11: mod_base = OTHER; note = 2'-O-methylguanosine-3'-phosphate
  modified_base 12: mod_base = OTHER; note = 2'-O-methyluridine-3'-phosphate
  modified_base 13: mod_base = OTHER; note = 2'-O-methylcytidine-3'-phosphate
  modified_base 14: mod_base = OTHER; note = 2'-fluoroguanosine-3'-phosphate
  modified_base 15: mod_base = OTHER; note = 2'-O-methyladenosine-3'-phosphate
  modified_base 16: mod_base = OTHER; note = 2'-fluorocytidine-3'-phosphate
  modified_base 17: mod_base = OTHER; note = 2'-O-methyladenosine-3'-phosphate
  modified_base 18: mod_base = OTHER; note = 2'-O-methylguanosine-3'-phosphate
  modified_base 19: mod_base = OTHER; note = 2'-O-methyladenosine-3'-phosphate
  modified_base 20: mod_base = OTHER; note = 2'-O-methyluridine-3'-phosphate
  modified_base 21: mod_base = OTHER; note = 2'-O-methylcytidine-3'-phosphorothioate
  modified_base 22: mod_base = OTHER; note = 2'-O-methyluridine-3'-phosphorothioate
  modified_base 23: mod_base = OTHER; note = 2'-O-methylguanosine-3'-phosphate
taaaacagaagtcgacagatctg

SEQ ID NO: 2888 - RNA, 21 nt, synthetic construct
  source 1..21: mol_type = other RNA; note = Description of Artificial Sequence: Synthetic oligonucleotide
  modified_base 1: mod_base = OTHER; note = 2'-O-methyladenosine-3'-phosphorothioate
  modified_base 2: mod_base = OTHER; note = 2'-O-methylguanosine-3'-phosphorothioate
  modified_base 3: mod_base = OTHER; note = 2'-O-methyladenosine-3'-phosphate
  modified_base 4: mod_base = OTHER; note = 2'-O-methyluridine-3'-phosphate
  modified_base 5: mod_base = OTHER; note = 2'-O-methylcytidine-3'-phosphate
  modified_base 6: mod_base = OTHER; note = 2'-O-methyluridine-3'-phosphate
  modified_base 7: mod_base = OTHER; note = 2'-fluoroguanosine-3'-phosphate
  modified_base 8: mod_base = OTHER; note = 2'-O-methyluridine-3'-phosphate
  modified_base 9: mod_base = OTHER; note = 2'-fluorocytidine-3'-phosphate
  modified_base 10: mod_base = OTHER; note = 2'-fluoroguanosine-3'-phosphate
  modified_base 11: mod_base = OTHER; note = 2'-fluoroadenosine-3'-phosphate
  modified_base 12: mod_base = OTHER; note = 2'-O-methylcytidine-3'-phosphate
  modified_base 13: mod_base = OTHER; note = 2'-O-methyluridine-3'-phosphate
  modified_base 14: mod_base = OTHER; note = 2'-O-methyluridine-3'-phosphate
  modified_base 15: mod_base = OTHER; note = 2'-O-methylcytidine-3'-phosphate
  modified_base 16: mod_base = OTHER; note = 2'-O-methyluridine-3'-phosphate
  modified_base 17: mod_base = OTHER; note = 2'-O-methylguanosine-3'-phosphate
  modified_base 18: mod_base = OTHER; note = 2'-O-methyluridine-3'-phosphate
  modified_base 19: mod_base = OTHER; note = 2'-O-methyluridine-3'-phosphate
  modified_base 20: mod_base = OTHER; note = 2'-O-methyluridine-3'-phosphate
  modified_base 21: mod_base = OTHER; note = 2'-O-methyluridine-3'-phosphate N-[tris(GalNAc-alkyl)-amidodecanoyl)]-4-hydroxyprolinol Hyp-(GalNAc-alkyl)3
agatctgtcgacttctgtttt

SEQ ID NO: 2889 - RNA, 23 nt, synthetic construct
  source 1..23: mol_type = other RNA; note = Description of Artificial Sequence: Synthetic oligonucleotide
  modified_base 1: mod_base = OTHER; note = 2'-O-methyladenosine-3'-phosphorothioate
  modified_base 2: mod_base = OTHER; note = 2'-fluoroadenosine-3'-phosphorothioate
  modified_base 3: mod_base = OTHER; note = 2'-O-methyladenosine-3'-phosphate
  modified_base 4: mod_base = OTHER; note = 2'-O-methyladenosine-3'-phosphate
  modified_base 5: mod_base = OTHER; note = 2'-O-methylcytidine-3'-phosphate
  modified_base 6: mod_base = OTHER; note = 2'-fluoroadenosine-3'-phosphate
  modified_base 7: mod_base = OTHER; note = 2'-O-methylguanosine-3'-phosphate
  modified_base 8: mod_base = OTHER; note = 2'-fluoroadenosine-3'-phosphate
  modified_base 9: mod_base = OTHER; note = 2'-fluoroadenosine-3'-phosphate
  modified_base 10: mod_base = OTHER; note = 2'-O-methylguanosine-3'-phosphate
  modified_base 11: mod_base = OTHER; note = 2'-O-methyluridine-3'-phosphate
  modified_base 12: mod_base = OTHER; note = 2'-O-methylcytidine-3'-phosphate
  modified_base 13: mod_base = OTHER; note = 2'-O-methylguanosine-3'-phosphate
  modified_base 14: mod_base = OTHER; note = 2'-fluoroadenosine-3'-phosphate
  modified_base 15: mod_base = OTHER; note = 2'-O-methylcytidine-3'-phosphate
  modified_base 16: mod_base = OTHER; note = 2'-fluoroadenosine-3'-phosphate
  modified_base 17: mod_base = OTHER; note = 2'-O-methylguanosine-3'-phosphate
  modified_base 18: mod_base = OTHER; note = 2'-O-methyladenosine-3'-phosphate
  modified_base 19: mod_base = OTHER; note = 2'-O-methyluridine-3'-phosphate
  modified_base 20: mod_base = OTHER; note = 2'-O-methylcytidine-3'-phosphate
  modified_base 21: mod_base = OTHER; note = 2'-O-methyluridine-3'-phosphorothioate
  modified_base 22: mod_base = OTHER; note = 2'-O-methylguanosine-3'-phosphorothioate
  modified_base 23: mod_base = OTHER; note = 2'-O-methyluridine-3'-phosphate
aaaacagaagtcgacagatctgt

SEQ ID NO: 2890 - RNA, 21 nt, synthetic construct
  source 1..21: mol_type = other RNA; note = Description of Artificial Sequence: Synthetic oligonucleotide
  modified_base 1: mod_base = OTHER; note = 2'-O-methylcytidine-3'-phosphorothioate
  modified_base 2: mod_base = OTHER; note = 2'-O-methylcytidine-3'-phosphorothioate
  modified_base 3: mod_base = OTHER; note = 2'-O-methylguanosine-3'-phosphate
  modified_base 4: mod_base = OTHER; note = 2'-O-methyladenosine-3'-phosphate
  modified_base 5: mod_base = OTHER; note = 2'-O-methylguanosine-3'-phosphate
  modified_base 6: mod_base = OTHER; note = 2'-O-methyladenosine-3'-phosphate
  modified_base 7: mod_base = OTHER; note = 2'-fluoroadenosine-3'-phosphate
  modified_base 8: mod_base = OTHER; note = 2'-O-methylguanosine-3'-phosphate
  modified_base 9: mod_base = OTHER; note = 2'-fluorouridine-3'-phosphate
  modified_base 10: mod_base = OTHER; note = 2'-fluorocytidine-3'-phosphate
  modified_base 11: mod_base = OTHER; note = 2'-fluoroadenosine-3'-phosphate
  modified_base 12: mod_base = OTHER; note = 2'-O-methylcytidine-3'-phosphate
  modified_base 13: mod_base = OTHER; note = 2'-O-methylcytidine-3'-phosphate
  modified_base 14: mod_base = OTHER; note = 2'-O-methyladenosine-3'-phosphate
  modified_base 15: mod_base = OTHER; note = 2'-O-methyladenosine-3'-phosphate
  modified_base 16: mod_base = OTHER; note = 2'-O-methylguanosine-3'-phosphate
  modified_base 17: mod_base = OTHER; note = 2'-O-methyladenosine-3'-phosphate
  modified_base 18: mod_base = OTHER; note = 2'-O-methyladenosine-3'-phosphate
  modified_base 19: mod_base = OTHER; note = 2'-O-methylguanosine-3'-phosphate
  modified_base 20: mod_base = OTHER; note = 2'-O-methylcytidine-3'-phosphate
  modified_base 21: mod_base = OTHER; note = 2'-O-methyluridine-3'-phosphate N-[tris(GalNAc-alkyl)-amidodecanoyl)]-4-hydroxyprolinol Hyp-(GalNAc-alkyl)3
ccgagaagtcaccaagaagct

SEQ ID NO: 2891 - RNA, 23 nt, synthetic construct
  source 1..23: mol_type = other RNA; note = Description of Artificial Sequence: Synthetic oligonucleotide
  modified_base 1: mod_base = OTHER; note = 2'-O-methyladenosine-3'-phosphorothioate
  modified_base 2: mod_base = OTHER; note = 2'-fluoroguanosine-3'-phosphorothioate
  modified_base 3: mod_base = OTHER; note = 2'-O-methylcytidine-3'-phosphate
  modified_base 4: mod_base = OTHER; note = 2'-O-methyluridine-3'-phosphate
  modified_base 5: mod_base = OTHER; note = 2'-O-methyluridine-3'-phosphate
  modified_base 6: mod_base = OTHER; note = 2'-fluorocytidine-3'-phosphate
  modified_base 7: mod_base = OTHER; note = 2'-O-methyluridine-3'-phosphate
  modified_base 8: mod_base = OTHER; note = 2'-fluorouridine-3'-phosphate
  modified_base 9: mod_base = OTHER; note = 2'-fluoroguanosine-3'-phosphate
  modified_base 10: mod_base = OTHER; note = 2'-O-methylguanosine-3'-phosphate
  modified_base 11: mod_base = OTHER; note = 2'-O-methyluridine-3'-phosphate
  modified_base 12: mod_base = OTHER; note = 2'-O-methylguanosine-3'-phosphate
  modified_base 13: mod_base = OTHER; note = 2'-O-methyladenosine-3'-phosphate
  modified_base 14: mod_base = OTHER; note = 2'-fluorocytidine-3'-phosphate
  modified_base 15: mod_base = OTHER; note = 2'-O-methyluridine-3'-phosphate
  modified_base 16: mod_base = OTHER; note = 2'-fluorouridine-3'-phosphate
  modified_base 17: mod_base = OTHER; note = 2'-O-methylcytidine-3'-phosphate
  modified_base 18: mod_base = OTHER; note = 2'-O-methyluridine-3'-phosphate
  modified_base 19: mod_base = OTHER; note = 2'-O-methylcytidine-3'-phosphate
  modified_base 20: mod_base = OTHER; note = 2'-O-methylguanosine-3'-phosphate
  modified_base 21: mod_base = OTHER; note = 2'-O-methylguanosine-3'-phosphorothioate
  modified_base 22: mod_base = OTHER; note = 2'-O-methyluridine-3'-phosphorothioate
  modified_base 23: mod_base = OTHER; note = 2'-O-methylcytidine-3'-phosphate
agcttcttggtgacttctcggtc

SEQ ID NO: 2892 - RNA, 21 nt, synthetic construct
  source 1..21: mol_type = other RNA; note = Description of Artificial Sequence: Synthetic oligonucleotide
  modified_base 1: mod_base = OTHER; note = 2'-O-methylcytidine-3'-phosphorothioate
  modified_base 2: mod_base = OTHER; note = 2'-O-methylguanosine-3'-phosphorothioate
  modified_base 3: mod_base = OTHER; note = 2'-O-methyladenosine-3'-phosphate
  modified_base 4: mod_base = OTHER; note = 2'-O-methylguanosine-3'-phosphate
  modified_base 5: mod_base = OTHER; note = 2'-O-methyladenosine-3'-phosphate
  modified_base 6: mod_base = OTHER; note = 2'-O-methyladenosine-3'-phosphate
  modified_base 7: mod_base = OTHER; note = 2'-fluoroguanosine-3'-phosphate
  modified_base 8: mod_base = OTHER; note = 2'-O-methyluridine-3'-phosphate
  modified_base 9: mod_base = OTHER; note = 2'-fluorocytidine-3'-phosphate
  modified_base 10: mod_base = OTHER; note = 2'-fluoroadenosine-3'-phosphate
  modified_base 11: mod_base = OTHER; note = 2'-fluorocytidine-3'-phosphate
  modified_base 12: mod_base = OTHER; note = 2'-O-methylcytidine-3'-phosphate
  modified_base 13: mod_base = OTHER; note = 2'-O-methyladenosine-3'-phosphate
  modified_base 14: mod_base = OTHER; note = 2'-O-methyladenosine-3'-phosphate
  modified_base 15: mod_base = OTHER; note = 2'-O-methylguanosine-3'-phosphate
  modified_base 16: mod_base = OTHER; note = 2'-O-methyladenosine-3'-phosphate
  modified_base 17: mod_base = OTHER; note = 2'-O-methyladenosine-3'-phosphate
  modified_base 18: mod_base = OTHER; note = 2'-O-methylguanosine-3'-phosphate
  modified_base 19: mod_base = OTHER; note = 2'-O-methylcytidine-3'-phosphate
  modified_base 20: mod_base = OTHER; note = 2'-O-methyluridine-3'-phosphate
  modified_base 21: mod_base = OTHER; note = 2'-O-methyladenosine-3'-phosphate N-[tris(GalNAc-alkyl)-amidodecanoyl)]-4-hydroxyprolinol Hyp-(GalNAc-alkyl)3
cgagaagtcaccaagaagcta

SEQ ID NO: 2893 - RNA, 23 nt, synthetic construct
  source 1..23: mol_type = other RNA; note = Description of Artificial Sequence: Synthetic oligonucleotide
  modified_base 1: mod_base = OTHER; note = 2'-O-methyluridine-3'-phosphorothioate
  modified_base 2: mod_base = OTHER; note = 2'-fluoroadenosine-3'-phosphorothioate
  modified_base 3: mod_base = OTHER; note = 2'-O-methylguanosine-3'-phosphate
  modified_base 4: mod_base = OTHER; note = 2'-O-methylcytidine-3'-phosphate
  modified_base 5: mod_base = OTHER; note = 2'-O-methyluridine-3'-phosphate
  modified_base 6: mod_base = OTHER; note = 2'-fluorouridine-3'-phosphate
  modified_base 7: mod_base = OTHER; note = 2'-O-methylcytidine-3'-phosphate
  modified_base 8: mod_base = OTHER; note = 2'-fluorouridine-3'-phosphate
  modified_base 9: mod_base = OTHER; note = 2'-fluorouridine-3'-phosphate
  modified_base 10: mod_base = OTHER; note = 2'-O-methylguanosine-3'-phosphate
  modified_base 11: mod_base = OTHER; note = 2'-O-methylguanosine-3'-phosphate
  modified_base 12: mod_base = OTHER; note = 2'-O-methyluridine-3'-phosphate
  modified_base 13: mod_base = OTHER; note = 2'-O-methylguanosine-3'-phosphate
  modified_base 14: mod_base = OTHER; note = 2'-fluoroadenosine-3'-phosphate
  modified_base 15: mod_base = OTHER; note = 2'-O-methylcytidine-3'-phosphate
  modified_base 16: mod_base = OTHER; note = 2'-fluorouridine-3'-phosphate
  modified_base 17: mod_base = OTHER; note = 2'-O-methyluridine-3'-phosphate
  modified_base 18: mod_base = OTHER; note = 2'-O-methylcytidine-3'-phosphate
  modified_base 19: mod_base = OTHER; note = 2'-O-methyluridine-3'-phosphate
  modified_base 20: mod_base = OTHER; note = 2'-O-methylcytidine-3'-phosphate
  modified_base 21: mod_base = OTHER; note = 2'-O-methylguanosine-3'-phosphorothioate
  modified_base 22: mod_base = OTHER; note = 2'-O-methylguanosine-3'-phosphorothioate
  modified_base 23: mod_base = OTHER; note = 2'-O-methyluridine-3'-phosphate
tagcttcttggtgacttctcggt

SEQ ID NO: 2894 - RNA, 21 nt, synthetic construct
  source 1..21: mol_type = other RNA; note = Description of Artificial Sequence: Synthetic oligonucleotide
  modified_base 1: mod_base = OTHER; note = 2'-O-methyladenosine-3'-phosphorothioate
  modified_base 2: mod_base = OTHER; note = 2'-O-methylguanosine-3'-phosphorothioate
  modified_base 3: mod_base = OTHER; note = 2'-O-methylguanosine-3'-phosphate
  modified_base 4: mod_base = OTHER; note = 2'-O-methyladenosine-3'-phosphate
  modified_base 5: mod_base = OTHER; note = 2'-O-methylcytidine-3'-phosphate
  modified_base 6: mod_base = OTHER; note = 2'-O-methylcytidine-3'-phosphate
  modified_base 7: mod_base = OTHER; note = 2'-fluoroguanosine-3'-phosphate
  modified_base 8: mod_base = OTHER; note = 2'-O-methyladenosine-3'-phosphate
  modified_base 9: mod_base = OTHER; note = 2'-fluoroguanosine-3'-phosphate
  modified_base 10: mod_base = OTHER; note = 2'-fluoroadenosine-3'-phosphate
  modified_base 11: mod_base = OTHER; note = 2'-fluoroadenosine-3'-phosphate
  modified_base 12: mod_base = OTHER; note = 2'-O-methylguanosine-3'-phosphate
  modified_base 13: mod_base = OTHER; note = 2'-O-methyluridine-3'-phosphate
  modified_base 14: mod_base = OTHER; note = 2'-O-methylcytidine-3'-phosphate
  modified_base 15: mod_base = OTHER; note = 2'-O-methyladenosine-3'-phosphate
  modified_base 16: mod_base = OTHER; note = 2'-O-methylcytidine-3'-phosphate
  modified_base 17: mod_base = OTHER; note = 2'-O-methylcytidine-3'-phosphate
  modified_base 18: mod_base = OTHER; note = 2'-O-methyladenosine-3'-phosphate
  modified_base 19: mod_base = OTHER; note = 2'-O-methyladenosine-3'-phosphate
  modified_base 20: mod_base = OTHER; note = 2'-O-methylguanosine-3'-phosphate
  modified_base 21: mod_base = OTHER; note = 2'-O-methyladenosine-3'-phosphate N-[tris(GalNAc-alkyl)-amidodecanoyl)]-4-hydroxyprolinol Hyp-(GalNAc-alkyl)3
aggaccgagaagtcaccaaga

SEQ ID NO: 2895 - RNA, 23 nt, synthetic construct
  source 1..23: mol_type = other RNA; note = Description of Artificial Sequence: Synthetic oligonucleotide
  modified_base 1: mod_base = OTHER; note = 2'-O-methyluridine-3'-phosphorothioate
  modified_base 2: mod_base = OTHER; note = 2'-fluorocytidine-3'-phosphorothioate
  modified_base 3: mod_base = OTHER; note = 2'-O-methyluridine-3'-phosphate
  modified_base 4: mod_base = OTHER; note = 2'-O-methyluridine-3'-phosphate
  modified_base 5: mod_base = OTHER; note = 2'-O-methylguanosine-3'-phosphate
  modified_base 6: mod_base = OTHER; note = 2'-fluoroguanosine-3'-phosphate
  modified_base 7: mod_base = OTHER; note = 2'-O-methyluridine-3'-phosphate
  modified_base 8: mod_base = OTHER; note = 2'-fluoroguanosine-3'-phosphate
  modified_base 9: mod_base = OTHER; note = 2'-fluoroadenosine-3'-phosphate
  modified_base 10: mod_base = OTHER; note = 2'-O-methylcytidine-3'-phosphate
  modified_base 11: mod_base = OTHER; note = 2'-O-methyluridine-3'-phosphate
  modified_base 12: mod_base = OTHER; note = 2'-O-methyluridine-3'-phosphate
  modified_base 13: mod_base = OTHER; note = 2'-O-methylcytidine-3'-phosphate
  modified_base 14: mod_base = OTHER; note = 2'-fluorouridine-3'-phosphate
  modified_base 15: mod_base = OTHER; note = 2'-O-methylcytidine-3'-phosphate
  modified_base 16: mod_base = OTHER; note = 2'-fluoroguanosine-3'-phosphate
  modified_base 17: mod_base = OTHER; note = 2'-O-methylguanosine-3'-phosphate
  modified_base 18: mod_base = OTHER; note = 2'-O-methyluridine-3'-phosphate
  modified_base 19: mod_base = OTHER; note = 2'-O-methylcytidine-3'-phosphate
  modified_base 20: mod_base = OTHER; note = 2'-O-methylcytidine-3'-phosphate
  modified_base 21: mod_base = OTHER; note = 2'-O-methyluridine-3'-phosphorothioate
  modified_base 22: mod_base = OTHER; note = 2'-O-methyluridine-3'-phosphorothioate
  modified_base 23: mod_base = OTHER; note = 2'-O-methylguanosine-3'-phosphate
tcttggtgacttctcggtccttg

SEQ ID NO: 2896 - RNA, 21 nt, synthetic construct
  source 1..21: mol_type = other RNA; note = Description of Artificial Sequence: Synthetic oligonucleotide
  modified_base 1: mod_base = OTHER; note = 2'-O-methyladenosine-3'-phosphorothioate
  modified_base 2: mod_base = OTHER; note = 2'-O-methyladenosine-3'-phosphorothioate
  modified_base 3: mod_base = OTHER; note = 2'-O-methylguanosine-3'-phosphate
  modified_base 4: mod_base = OTHER; note = 2'-O-methylguanosine-3'-phosphate
  modified_base 5: mod_base = OTHER; note = 2'-O-methyladenosine-3'-phosphate
  modified_base 6: mod_base = OTHER; note = 2'-O-methylcytidine-3'-phosphate
  modified_base 7: mod_base = OTHER; note = 2'-fluorocytidine-3'-phosphate
  modified_base 8: mod_base = OTHER; note = 2'-O-methylguanosine-3'-phosphate
  modified_base 9: mod_base = OTHER; note = 2'-fluoroadenosine-3'-phosphate
  modified_base 10: mod_base = OTHER; note = 2'-fluoroguanosine-3'-phosphate
  modified_base 11: mod_base = OTHER; note = 2'-fluoroadenosine-3'-phosphate
  modified_base 12: mod_base = OTHER; note = 2'-O-methyladenosine-3'-phosphate
  modified_base 13: mod_base = OTHER; note = 2'-O-methylguanosine-3'-phosphate
  modified_base 14: mod_base = OTHER; note = 2'-O-methyluridine-3'-phosphate
  modified_base 15: mod_base = OTHER; note = 2'-O-methylcytidine-3'-phosphate
  modified_base 16: mod_base = OTHER; note = 2'-O-methyladenosine-3'-phosphate
  modified_base 17: mod_base = OTHER; note = 2'-O-methylcytidine-3'-phosphate
  modified_base 18: mod_base = OTHER; note = 2'-O-methylcytidine-3'-phosphate
  modified_base 19: mod_base = OTHER; note = 2'-O-methyladenosine-3'-phosphate
  modified_base 20: mod_base = OTHER; note = 2'-O-methyladenosine-3'-phosphate
  modified_base 21: mod_base = OTHER; note = 2'-O-methylguanosine-3'-phosphate N-[tris(GalNAc-alkyl)-amidodecanoyl)]-4-hydroxyprolinol Hyp-(GalNAc-alkyl)3
aaggaccgagaagtcaccaag

SEQ ID NO: 2897 - RNA, 23 nt, synthetic construct
  source 1..23: mol_type = other RNA; note = Description of Artificial Sequence: Synthetic oligonucleotide
  modified_base 1: mod_base = OTHER; note = 2'-O-methylcytidine-3'-phosphorothioate
  modified_base 2: mod_base = OTHER; note = 2'-fluorouridine -3'-phosphorothioate
  modified_base 3: mod_base = OTHER; note = 2'-O-methyluridine-3'-phosphate
  modified_base 4: mod_base = OTHER; note = 2'-O-methylguanosine-3'-phosphate
  modified_base 5: mod_base = OTHER; note = 2'-O-methylguanosine-3'-phosphate
  modified_base 6: mod_base = OTHER; note = 2'-fluorouridine-3'-phosphate
  modified_base 7: mod_base = OTHER; note = 2'-O-methylguanosine-3'-phosphate
  modified_base 8: mod_base = OTHER; note = 2'-fluoroadenosine-3'-phosphate
  modified_base 9: mod_base = OTHER; note = 2'-fluorocytidine-3'-phosphate
  modified_base 10: mod_base = OTHER; note = 2'-O-methyluridine-3'-phosphate
  modified_base 11: mod_base = OTHER; note = 2'-O-methyluridine-3'-phosphate
  modified_base 12: mod_base = OTHER; note = 2'-O-methylcytidine-3'-phosphate
  modified_base 13: mod_base = OTHER; note = 2'-O-methyluridine-3'-phosphate
  modified_base 14: mod_base = OTHER; note = 2'-fluorocytidine-3'-phosphate
  modified_base 15: mod_base = OTHER; note = 2'-O-methylguanosine-3'-phosphate
  modified_base 16: mod_base = OTHER; note = 2'-fluoroguanosine-3'-phosphate
  modified_base 17: mod_base = OTHER; note = 2'-O-methyluridine-3'-phosphate
  modified_base 18: mod_base = OTHER; note = 2'-O-methylcytidine-3'-phosphate
  modified_base 19: mod_base = OTHER; note = 2'-O-methylcytidine-3'-phosphate
  modified_base 20: mod_base = OTHER; note = 2'-O-methyluridine-3'-phosphate
  modified_base 21: mod_base = OTHER; note = 2'-O-methyluridine-3'-phosphorothioate
  modified_base 22: mod_base = OTHER; note = 2'-O-methylguanosine-3'-phosphorothioate
  modified_base 23: mod_base = OTHER; note = 2'-O-methyluridine-3'-phosphate
cttggtgacttctcggtccttgt

SEQ ID NO: 2898 - RNA, 21 nt, synthetic construct
  source 1..21: mol_type = other RNA; note = Description of Artificial Sequence: Synthetic oligonucleotide
  modified_base 1: mod_base = OTHER; note = 2'-O-methyladenosine-3'-phosphorothioate
  modified_base 2: mod_base = OTHER; note = 2'-O-methyladenosine-3'-phosphorothioate
  modified_base 3: mod_base = OTHER; note = 2'-O-methyladenosine-3'-phosphate
  modified_base 4: mod_base = OTHER; note = 2'-O-methylcytidine-3'-phosphate
  modified_base 5: mod_base = OTHER; note = 2'-O-methyladenosine-3'-phosphate
  modified_base 6: mod_base = OTHER; note = 2'-O-methyluridine-3'-phosphate
  modified_base 7: mod_base = OTHER; note = 2'-fluoroguanosine-3'-phosphate
  modified_base 8: mod_base = OTHER; note = 2'-O-methylguanosine-3'-phosphate
  modified_base 9: mod_base = OTHER; note = 2'-fluorocytidine-3'-phosphate
  modified_base 10: mod_base = OTHER; note = 2'-fluorouridine-3'-phosphate
  modified_base 11: mod_base = OTHER; note = 2'-fluorouridine-3'-phosphate
  modified_base 12: mod_base = OTHER; note = 2'-O-methylguanosine-3'-phosphate
  modified_base 13: mod_base = OTHER; note = 2'-O-methyladenosine-3'-phosphate
  modified_base 14: mod_base = OTHER; note = 2'-O-methyladenosine-3'-phosphate
  modified_base 15: mod_base = OTHER; note = 2'-O-methyluridine-3'-phosphate
  modified_base 16: mod_base = OTHER; note = 2'-O-methylguanosine-3'-phosphate
  modified_base 17: mod_base = OTHER; note = 2'-O-methylguanosine-3'-phosphate
  modified_base 18: mod_base = OTHER; note = 2'-O-methylguanosine-3'-phosphate
  modified_base 19: mod_base = OTHER; note = 2'-O-methyladenosine-3'-phosphate
  modified_base 20: mod_base = OTHER; note = 2'-O-methyluridine-3'-phosphate
  modified_base 21: mod_base = OTHER; note = 2'-O-methylcytidine-3'-phosphate N-[tris(GalNAc-alkyl)-amidodecanoyl)]-4-hydroxyprolinol Hyp-(GalNAc-alkyl)3
aaacatggcttgaatgggatc

SEQ ID NO: 2899 - RNA, 23 nt, synthetic construct
  source 1..23: mol_type = other RNA; note = Description of Artificial Sequence: Synthetic oligonucleotide
  modified_base 1: mod_base = OTHER; note = 2'-O-methylguanosine-3'-phosphorothioate
  modified_base 2: mod_base = OTHER; note = 2'-fluoroadenosine-3'-phosphorothioate
  modified_base 3: mod_base = OTHER; note = 2'-O-methyluridine-3'-phosphate
  modified_base 4: mod_base = OTHER; note = 2'-O-methylcytidine-3'-phosphate
  modified_base 5: mod_base = OTHER; note = 2'-O-methylcytidine-3'-phosphate
  modified_base 6: mod_base = OTHER; note = 2'-fluorocytidine-3'-phosphate
  modified_base 7: mod_base = OTHER; note = 2'-O-methyladenosine-3'-phosphate
  modified_base 8: mod_base = OTHER; note = 2'-fluorouridine-3'-phosphate
  modified_base 9: mod_base = OTHER; note = 2'-fluorouridine-3'-phosphate
  modified_base 10: mod_base = OTHER; note = 2'-O-methylcytidine-3'-phosphate
  modified_base 11: mod_base = OTHER; note = 2'-O-methyladenosine-3'-phosphate
  modified_base 12: mod_base = OTHER; note = 2'-O-methyladenosine-3'-phosphate
  modified_base 13: mod_base = OTHER; note = 2'-O-methylguanosine-3'-phosphate
  modified_base 14: mod_base = OTHER; note = 2'-fluorocytidine-3'-phosphate
  modified_base 15: mod_base = OTHER; note = 2'-O-methylcytidine-3'-phosphate
  modified_base 16: mod_base = OTHER; note = 2'-fluoroadenosine-3'-phosphate
  modified_base 17: mod_base = OTHER; note = 2'-O-methyluridine-3'-phosphate
  modified_base 18: mod_base = OTHER; note = 2'-O-methylguanosine-3'-phosphate
  modified_base 19: mod_base = OTHER; note = 2'-O-methyluridine-3'-phosphate
  modified_base 20: mod_base = OTHER; note = 2'-O-methyluridine-3'-phosphate
  modified_base 21: mod_base = OTHER; note = 2'-O-methyluridine-3'-phosphorothioate
  modified_base 22: mod_base = OTHER; note = 2'-O-methyladenosine-3'-phosphorothioate
  modified_base 23: mod_base = OTHER; note = 2'-O-methyladenosine-3'-phosphate
gatcccattcaagccatgtttaa

SEQ ID NO: 2900 - RNA, 21 nt, synthetic construct
  source 1..21: mol_type = other RNA; note = Description of Artificial Sequence: Synthetic oligonucleotide
  modified_base 1: mod_base = OTHER; note = 2'-O-methyladenosine-3'-phosphorothioate
  modified_base 2: mod_base = OTHER; note = 2'-O-methyladenosine-3'-phosphorothioate
  modified_base 3: mod_base = OTHER; note = 2'-O-methylcytidine-3'-phosphate
  modified_base 4: mod_base = OTHER; note = 2'-O-methyladenosine-3'-phosphate
  modified_base 5: mod_base = OTHER; note = 2'-O-methyluridine-3'-phosphate
  modified_base 6: mod_base = OTHER; note = 2'-O-methylguanosine-3'-phosphate
  modified_base 7: mod_base = OTHER; note = 2'-fluoroguanosine-3'-phosphate
  modified_base 8: mod_base = OTHER; note = 2'-O-methylcytidine-3'-phosphate
  modified_base 9: mod_base = OTHER; note = 2'-fluorouridine-3'-phosphate
  modified_base 10: mod_base = OTHER; note = 2'-fluorouridine-3'-phosphate
  modified_base 11: mod_base = OTHER; note = 2'-fluoroguanosine-3'-phosphate
  modified_base 12: mod_base = OTHER; note = 2'-O-methyladenosine-3'-phosphate
  modified_base 13: mod_base = OTHER; note = 2'-O-methyladenosine-3'-phosphate
  modified_base 14: mod_base = OTHER; note = 2'-O-methyluridine-3'-phosphate
  modified_base 15: mod_base = OTHER; note = 2'-O-methylguanosine-3'-phosphate
  modified_base 16: mod_base = OTHER; note = 2'-O-methylguanosine-3'-phosphate
  modified_base 17: mod_base = OTHER; note = 2'-O-methylguanosine-3'-phosphate
  modified_base 18: mod_base = OTHER; note = 2'-O-methyladenosine-3'-phosphate
  modified_base 19: mod_base = OTHER; note = 2'-O-methyluridine-3'-phosphate
  modified_base 20: mod_base = OTHER; note = 2'-O-methylcytidine-3'-phosphate
  modified_base 21: mod_base = OTHER; note = 2'-O-methyluridine-3'-phosphate N-[tris(GalNAc-alkyl)-amidodecanoyl)]-4-hydroxyprolinol Hyp-(GalNAc-alkyl)3
aacatggcttgaatgggatct

SEQ ID NO: 2901 - RNA, 23 nt, synthetic construct
  source 1..23: mol_type = other RNA; note = Description of Artificial Sequence: Synthetic oligonucleotide
  modified_base 1: mod_base = OTHER; note = 2'-O-methyladenosine-3'-phosphorothioate
  modified_base 2: mod_base = OTHER; note = 2'-fluoroguanosine-3'-phosphorothioate
  modified_base 3: mod_base = OTHER; note = 2'-O-methyladenosine-3'-phosphate
  modified_base 4: mod_base = OTHER; note = 2'-O-methyluridine-3'-phosphate
  modified_base 5: mod_base = OTHER; note = 2'-O-methylcytidine-3'-phosphate
  modified_base 6: mod_base = OTHER; note = 2'-fluorocytidine-3'-phosphate
  modified_base 7: mod_base = OTHER; note = 2'-O-methylcytidine-3'-phosphate
  modified_base 8: mod_base = OTHER; note = 2'-fluoroadenosine-3'-phosphate
  modified_base 9: mod_base = OTHER; note = 2'-fluorouridine-3'-phosphate
  modified_base 10: mod_base = OTHER; note = 2'-O-methyluridine-3'-phosphate
  modified_base 11: mod_base = OTHER; note = 2'-O-methylcytidine-3'-phosphate
  modified_base 12: mod_base = OTHER; note = 2'-O-methyladenosine-3'-phosphate
  modified_base 13: mod_base = OTHER; note = 2'-O-methyladenosine-3'-phosphate
  modified_base 14: mod_base = OTHER; note = 2'-fluoroguanosine-3'-phosphate
  modified_base 15: mod_base = OTHER; note = 2'-O-methylcytidine-3'-phosphate
  modified_base 16: mod_base = OTHER; note = 2'-fluorocytidine-3'-phosphate
  modified_base 17: mod_base = OTHER; note = 2'-O-methyladenosine-3'-phosphate
  modified_base 18: mod_base = OTHER; note = 2'-O-methyluridine-3'-phosphate
  modified_base 19: mod_base = OTHER; note = 2'-O-methylguanosine-3'-phosphate
  modified_base 20: mod_base = OTHER; note = 2'-O-methyluridine-3'-phosphate
  modified_base 21: mod_base = OTHER; note = 2'-O-methyluridine-3'-phosphorothioate
  modified_base 22: mod_base = OTHER; note = 2'-O-methyluridine-3'-phosphorothioate
  modified_base 23: mod_base = OTHER; note = 2'-O-methyladenosine-3'-phosphate
agatcccattcaagccatgttta

SEQ ID NO: 2902 - RNA, 21 nt, synthetic construct
  source 1..21: mol_type = other RNA; note = Description of Artificial Sequence: Synthetic oligonucleotide
  modified_base 1: mod_base = OTHER; note = 2'-O-methyluridine-3'-phosphorothioate
  modified_base 2: mod_base = OTHER; note = 2'-O-methylguanosine-3'-phosphorothioate
  modified_base 3: mod_base = OTHER; note = 2'-O-methyluridine-3'-phosphate
  modified_base 4: mod_base = OTHER; note = 2'-O-methyluridine-3'-phosphate
  modified_base 5: mod_base = OTHER; note = 2'-O-methyladenosine-3'-phosphate
  modified_base 6: mod_base = OTHER; note = 2'-O-methyladenosine-3'-phosphate
  modified_base 7: mod_base = OTHER; note = 2'-fluoroadenosine-3'-phosphate
  modified_base 8: mod_base = OTHER; note = 2'-O-methylcytidine-3'-phosphate
  modified_base 9: mod_base = OTHER; note = 2'-fluoroadenosine-3'-phosphate
  modified_base 10: mod_base = OTHER; note = 2'-fluorouridine-3'-phosphate
  modified_base 11: mod_base = OTHER; note = 2'-fluoroguanosine-3'-phosphate
  modified_base 12: mod_base = OTHER; note = 2'-O-methylguanosine-3'-phosphate
  modified_base 13: mod_base = OTHER; note = 2'-O-methylcytidine-3'-phosphate
  modified_base 14: mod_base = OTHER; note = 2'-O-methyluridine-3'-phosphate
  modified_base 15: mod_base = OTHER; note = 2'-O-methyluridine-3'-phosphate
  modified_base 16: mod_base = OTHER; note = 2'-O-methylguanosine-3'-phosphate
  modified_base 17: mod_base = OTHER; note = 2'-O-methyladenosine-3'-phosphate
  modified_base 18: mod_base = OTHER; note = 2'-O-methyladenosine-3'-phosphate
  modified_base 19: mod_base = OTHER; note = 2'-O-methyluridine-3'-phosphate
  modified_base 20: mod_base = OTHER; note = 2'-O-methylguanosine-3'-phosphate
  modified_base 21: mod_base = OTHER; note = 2'-O-methylguanosine-3'-phosphate N-[tris(GalNAc-alkyl)-amidodecanoyl)]-4-hydroxyprolinol Hyp-(GalNAc-alkyl)3
tgttaaacatggcttgaatgg

SEQ ID NO: 2903 - RNA, 23 nt, synthetic construct
  source 1..23: mol_type = other RNA; note = Description of Artificial Sequence: Synthetic oligonucleotide
  modified_base 1: mod_base = OTHER; note = 2'-O-methylcytidine-3'-phosphorothioate
  modified_base 2: mod_base = OTHER; note = 2'-fluorocytidine-3'-phosphorothioate
  modified_base 3: mod_base = OTHER; note = 2'-O-methyladenosine-3'-phosphate
  modified_base 4: mod_base = OTHER; note = 2'-O-methyluridine-3'-phosphate
  modified_base 5: mod_base = OTHER; note = 2'-O-methyluridine-3'-phosphate
  modified_base 6: mod_base = OTHER; note = 2'-fluorocytidine-3'-phosphate
  modified_base 7: mod_base = OTHER; note = 2'-O-methyladenosine-3'-phosphate
  modified_base 8: mod_base = OTHER; note = 2'-fluoroadenosine-3'-phosphate
  modified_base 9: mod_base = OTHER; note = 2'-fluoroguanosine-3'-phosphate
  modified_base 10: mod_base = OTHER; note = 2'-O-methylcytidine-3'-phosphate
  modified_base 11: mod_base = OTHER; note = 2'-O-methylcytidine-3'-phosphate
  modified_base 12: mod_base = OTHER; note = 2'-O-methyladenosine-3'-phosphate
  modified_base 13: mod_base = OTHER; note = 2'-O-methyluridine-3'-phosphate
  modified_base 14: mod_base = OTHER; note = 2'-fluoroguanosine-3'-phosphate
  modified_base 15: mod_base = OTHER; note = 2'-O-methyluridine-3'-phosphate
  modified_base 16: mod_base = OTHER; note = 2'-fluorouridine-3'-phosphate
  modified_base 17: mod_base = OTHER; note = 2'-O-methyluridine-3'-phosphate
  modified_base 18: mod_base = OTHER; note = 2'-O-methyladenosine-3'-phosphate
  modified_base 19: mod_base = OTHER; note = 2'-O-methyladenosine-3'-phosphate
  modified_base 20: mod_base = OTHER; note = 2'-O-methylcytidine-3'-phosphate
  modified_base 21: mod_base = OTHER; note = 2'-O-methyladenosine-3'-phosphorothioate
  modified_base 22: mod_base = OTHER; note = 2'-O-methylguanosine-3'-phosphorothioate
  modified_base 23: mod_base = OTHER; note = 2'-O-methylcytidine-3'-phosphate
ccattcaagccatgtttaacagc

SEQ ID NO: 2904 - RNA, 21 nt, synthetic construct
  source 1..21: mol_type = other RNA; note = Description of Artificial Sequence: Synthetic oligonucleotide
  modified_base 1: mod_base = OTHER; note = 2'-O-methylcytidine-3'-phosphorothioate
  modified_base 2: mod_base = OTHER; note = 2'-O-methyluridine-3'-phosphorothioate
  modified_base 3: mod_base = OTHER; note = 2'-O-methylguanosine-3'-phosphate
  modified_base 4: mod_base = OTHER; note = 2'-O-methyluridine-3'-phosphate
  modified_base 5: mod_base = OTHER; note = 2'-O-methyluridine-3'-phosphate
  modified_base 6: mod_base = OTHER; note = 2'-O-methyladenosine-3'-phosphate
  modified_base 7: mod_base = OTHER; note = 2'-fluoroadenosine-3'-phosphate
  modified_base 8: mod_base = OTHER; note = 2'-O-methyladenosine-3'-phosphate
  modified_base 9: mod_base = OTHER; note = 2'-fluorocytidine-3'-phosphate
  modified_base 10: mod_base = OTHER; note = 2'-fluoroadenosine-3'-phosphate
  modified_base 11: mod_base = OTHER; note = 2'-fluorouridine-3'-phosphate
  modified_base 12: mod_base = OTHER; note = 2'-O-methylguanosine-3'-phosphate
  modified_base 13: mod_base = OTHER; note = 2'-O-methylguanosine-3'-phosphate
  modified_base 14: mod_base = OTHER; note = 2'-O-methylcytidine-3'-phosphate
  modified_base 15: mod_base = OTHER; note = 2'-O-methyluridine-3'-phosphate
  modified_base 16: mod_base = OTHER; note = 2'-O-methyluridine-3'-phosphate
  modified_base 17: mod_base = OTHER; note = 2'-O-methylguanosine-3'-phosphate
  modified_base 18: mod_base = OTHER; note = 2'-O-methyladenosine-3'-phosphate
  modified_base 19: mod_base = OTHER; note = 2'-O-methyladenosine-3'-phosphate
  modified_base 20: mod_base = OTHER; note = 2'-O-methyluridine-3'-phosphate
  modified_base 21: mod_base = OTHER; note = 2'-O-methylguanosine-3'-phosphate N-[tris(GalNAc-alkyl)-amidodecanoyl)]-4-hydroxyprolinol Hyp-(GalNAc-alkyl)3
ctgttaaacatggcttgaatg

SEQ ID NO: 2905 - RNA, 23 nt, synthetic construct
  source 1..23: mol_type = other RNA; note = Description of Artificial Sequence: Synthetic oligonucleotide
  modified_base 1: mod_base = OTHER; note = 2'-O-methylcytidine-3'-phosphorothioate
  modified_base 2: mod_base = OTHER; note = 2'-fluoroadenosine-3'-phosphorothioate
  modified_base 3: mod_base = OTHER; note = 2'-O-methyluridine-3'-phosphate
  modified_base 4: mod_base = OTHER; note = 2'-O-methyluridine-3'-phosphate
  modified_base 5: mod_base = OTHER; note = 2'-O-methylcytidine-3'-phosphate
  modified_base 6: mod_base = OTHER; note = 2'-fluoroadenosine-3'-phosphate
  modified_base 7: mod_base = OTHER; note = 2'-O-methyladenosine-3'-phosphate
  modified_base 8: mod_base = OTHER; note = 2'-fluoroguanosine-3'-phosphate
  modified_base 9: mod_base = OTHER; note = 2'-fluorocytidine-3'-phosphate
  modified_base 10: mod_base = OTHER; note = 2'-O-methylcytidine-3'-phosphate
  modified_base 11: mod_base = OTHER; note = 2'-O-methyladenosine-3'-phosphate
  modified_base 12: mod_base = OTHER; note = 2'-O-methyluridine-3'-phosphate
  modified_base 13: mod_base = OTHER; note = 2'-O-methylguanosine-3'-phosphate
  modified_base 14: mod_base = OTHER; note = 2'-fluorouridine-3'-phosphate
  modified_base 15: mod_base = OTHER; note = 2'-O-methyluridine-3'-phosphate
  modified_base 16: mod_base = OTHER; note = 2'-fluorouridine-3'-phosphate
  modified_base 17: mod_base = OTHER; note = 2'-O-methyladenosine-3'-phosphate
  modified_base 18: mod_base = OTHER; note = 2'-O-methyladenosine-3'-phosphate
  modified_base 19: mod_base = OTHER; note = 2'-O-methylcytidine-3'-phosphate
  modified_base 20: mod_base = OTHER; note = 2'-O-methyladenosine-3'-phosphate
  modified_base 21: mod_base = OTHER; note = 2'-O-methylguanosine-3'-phosphorothioate
  modified_base 22: mod_base = OTHER; note = 2'-O-methylcytidine-3'-phosphorothioate
  modified_base 23: mod_base = OTHER; note = 2'-O-methylcytidine-3'-phosphate
cattcaagccatgtttaacagcc

SEQ ID NO: 2906 - RNA, 21 nt, synthetic construct
  source 1..21: mol_type = other RNA; note = Description of Artificial Sequence: Synthetic oligonucleotide
  modified_base 1: mod_base = OTHER; note = 2'-O-methylguanosine-3'-phosphorothioate
  modified_base 2: mod_base = OTHER; note = 2'-O-methyladenosine-3'-phosphorothioate
  modified_base 3: mod_base = OTHER; note = 2'-O-methylcytidine-3'-phosphate
  modified_base 4: mod_base = OTHER; note = 2'-O-methyluridine-3'-phosphate
  modified_base 5: mod_base = OTHER; note = 2'-O-methyluridine-3'-phosphate
  modified_base 6: mod_base = OTHER; note = 2'-O-methylguanosine-3'-phosphate
  modified_base 7: mod_base = OTHER; note = 2'-fluorocytidine-3'-phosphate
  modified_base 8: mod_base = OTHER; note = 2'-O-methyluridine-3'-phosphate
  modified_base 9: mod_base = OTHER; note = 2'-fluoroguanosine-3'-phosphate
  modified_base 10: mod_base = OTHER; note = 2'-fluorocytidine-3'-phosphate
  modified_base 11: mod_base = OTHER; note = 2'-fluoroadenosine-3'-phosphate
  modified_base 12: mod_base = OTHER; note = 2'-O-methyluridine-3'-phosphate
  modified_base 13: mod_base = OTHER; note = 2'-O-methyladenosine-3'-phosphate
  modified_base 14: mod_base = OTHER; note = 2'-O-methyluridine-3'-phosphate
  modified_base 15: mod_base = OTHER; note = 2'-O-methylguanosine-3'-phosphate
  modified_base 16: mod_base = OTHER; note = 2'-O-methyluridine-3'-phosphate
  modified_base 17: mod_base = OTHER; note = 2'-O-methylguanosine-3'-phosphate
  modified_base 18: mod_base = OTHER; note = 2'-O-methylguanosine-3'-phosphate
  modified_base 19: mod_base = OTHER; note = 2'-O-methylcytidine-3'-phosphate
  modified_base 20: mod_base = OTHER; note = 2'-O-methyluridine-3'-phosphate
  modified_base 21: mod_base = OTHER; note = 2'-O-methyladenosine-3'-phosphate N-[tris(GalNAc-alkyl)-amidodecanoyl)]-4-hydroxyprolinol Hyp-(GalNAc-alkyl)3
gacttgctgcatatgtggcta

SEQ ID NO: 2907 - RNA, 23 nt, synthetic construct
  source 1..23: mol_type = other RNA; note = Description of Artificial Sequence: Synthetic oligonucleotide
  modified_base 1: mod_base = OTHER; note = 2'-O-methyluridine-3'-phosphorothioate
  modified_base 2: mod_base = OTHER; note = 2'-fluoroadenosine-3'-phosphorothioate
  modified_base 3: mod_base = OTHER; note = 2'-O-methylguanosine-3'-phosphate
  modified_base 4: mod_base = OTHER; note = 2'-O-methylcytidine-3'-phosphate
  modified_base 5: mod_base = OTHER; note = 2'-O-methylcytidine-3'-phosphate
  modified_base 6: mod_base = OTHER; note = 2'-fluoroadenosine-3'-phosphate
  modified_base 7: mod_base = OTHER; note = 2'-O-methylcytidine-3'-phosphate
  modified_base 8: mod_base = OTHER; note = 2'-fluoroadenosine-3'-phosphate
  modified_base 9: mod_base = OTHER; note = 2'-fluorouridine-3'-phosphate
  modified_base 10: mod_base = OTHER; note = 2'-O-methyladenosine-3'-phosphate
  modified_base 11: mod_base = OTHER; note = 2'-O-methyluridine-3'-phosphate
  modified_base 12: mod_base = OTHER; note = 2'-O-methylguanosine-3'-phosphate
  modified_base 13: mod_base = OTHER; note = 2'-O-methylcytidine-3'-phosphate
  modified_base 14: mod_base = OTHER; note = 2'-fluoroadenosine-3'-phosphate
  modified_base 15: mod_base = OTHER; note = 2'-O-methylguanosine-3'-phosphate
  modified_base 16: mod_base = OTHER; note = 2'-fluorocytidine-3'-phosphate
  modified_base 17: mod_base = OTHER; note = 2'-O-methyladenosine-3'-phosphate
  modified_base 18: mod_base = OTHER; note = 2'-O-methyladenosine-3'-phosphate
  modified_base 19: mod_base = OTHER; note = 2'-O-methylguanosine-3'-phosphate
  modified_base 20: mod_base = OTHER; note = 2'-O-methyluridine-3'-phosphate
  modified_base 21: mod_base = OTHER; note = 2'-O-methylcytidine-3'-phosphorothioate
  modified_base 22: mod_base = OTHER; note = 2'-O-methylcytidine-3'-phosphorothioate
  modified_base 23: mod_base = OTHER; note = 2'-O-methyladenosine-3'-phosphate
tagccacatatgcagcaagtcca

SEQ ID NO: 2908 - RNA, 21 nt, synthetic construct
  source 1..21: mol_type = other RNA; note = Description of Artificial Sequence: Synthetic oligonucleotide
  modified_base 1: mod_base = OTHER; note = 2'-O-methyladenosine-3'-phosphorothioate
  modified_base 2: mod_base = OTHER; note = 2'-O-methylcytidine-3'-phosphorothioate
  modified_base 3: mod_base = OTHER; note = 2'-O-methyluridine-3'-phosphate
  modified_base 4: mod_base = OTHER; note = 2'-O-methyluridine-3'-phosphate
  modified_base 5: mod_base = OTHER; note = 2'-O-methylguanosine-3'-phosphate
  modified_base 6: mod_base = OTHER; note = 2'-O-methylcytidine-3'-phosphate
  modified_base 7: mod_base = OTHER; note = 2'-fluorouridine-3'-phosphate
  modified_base 8: mod_base = OTHER; note = 2'-O-methylguanosine-3'-phosphate
  modified_base 9: mod_base = OTHER; note = 2'-fluorocytidine-3'-phosphate
  modified_base 10: mod_base = OTHER; note = 2'-fluoroadenosine-3'-phosphate
  modified_base 11: mod_base = OTHER; note = 2'-fluorouridine-3'-phosphate
  modified_base 12: mod_base = OTHER; note = 2'-O-methyladenosine-3'-phosphate
  modified_base 13: mod_base = OTHER; note = 2'-O-methyluridine-3'-phosphate
  modified_base 14: mod_base = OTHER; note = 2'-O-methylguanosine-3'-phosphate
  modified_base 15: mod_base = OTHER; note = 2'-O-methyluridine-3'-phosphate
  modified_base 16: mod_base = OTHER; note = 2'-O-methylguanosine-3'-phosphate
  modified_base 17: mod_base = OTHER; note = 2'-O-methylguanosine-3'-phosphate
  modified_base 18: mod_base = OTHER; note = 2'-O-methylcytidine-3'-phosphate
  modified_base 19: mod_base = OTHER; note = 2'-O-methyluridine-3'-phosphate
  modified_base 20: mod_base = OTHER; note = 2'-O-methyladenosine-3'-phosphate
  modified_base 21: mod_base = OTHER; note = 2'-O-methyladenosine-3'-phosphate N-[tris(GalNAc-alkyl)-amidodecanoyl)]-4-hydroxyprolinol Hyp-(GalNAc-alkyl)3
acttgctgcatatgtggctaa

SEQ ID NO: 2909 - RNA, 23 nt, synthetic construct
  source 1..23: mol_type = other RNA; note = Description of Artificial Sequence: Synthetic oligonucleotide
  modified_base 1: mod_base = OTHER; note = 2'-O-methyluridine-3'-phosphorothioate
  modified_base 2: mod_base = OTHER; note = 2'-fluorouridine -3'-phosphorothioate
  modified_base 3: mod_base = OTHER; note = 2'-O-methyladenosine-3'-phosphate
  modified_base 4: mod_base = OTHER; note = 2'-O-methylguanosine-3'-phosphate
  modified_base 5: mod_base = OTHER; note = 2'-O-methylcytidine-3'-phosphate
  modified_base 6: mod_base = OTHER; note = 2'-fluorocytidine-3'-phosphate
  modified_base 7: mod_base = OTHER; note = 2'-O-methyladenosine-3'-phosphate
  modified_base 8: mod_base = OTHER; note = 2'-fluorocytidine-3'-phosphate
  modified_base 9: mod_base = OTHER; note = 2'-fluoroadenosine-3'-phosphate
  modified_base 10: mod_base = OTHER; note = 2'-O-methyluridine-3'-phosphate
  modified_base 11: mod_base = OTHER; note = 2'-O-methyladenosine-3'-phosphate
  modified_base 12: mod_base = OTHER; note = 2'-O-methyluridine-3'-phosphate
  modified_base 13: mod_base = OTHER; note = 2'-O-methylguanosine-3'-phosphate
  modified_base 14: mod_base = OTHER; note = 2'-fluorocytidine-3'-phosphate
  modified_base 15: mod_base = OTHER; note = 2'-O-methyladenosine-3'-phosphate
  modified_base 16: mod_base = OTHER; note = 2'-fluoroguanosine-3'-phosphate
  modified_base 17: mod_base = OTHER; note = 2'-O-methylcytidine-3'-phosphate
  modified_base 18: mod_base = OTHER; note = 2'-O-methyladenosine-3'-phosphate
  modified_base 19: mod_base = OTHER; note = 2'-O-methyladenosine-3'-phosphate
  modified_base 20: mod_base = OTHER; note = 2'-O-methylguanosine-3'-phosphate
  modified_base 21: mod_base = OTHER; note = 2'-O-methyluridine-3'-phosphorothioate
  modified_base 22: mod_base = OTHER; note = 2'-O-methylcytidine-3'-phosphorothioate
  modified_base 23: mod_base = OTHER; note = 2'-O-methylcytidine-3'-phosphate
ttagccacatatgcagcaagtcc

SEQ ID NO: 2910 - RNA, 21 nt, synthetic construct
  source 1..21: mol_type = other RNA; note = Description of Artificial Sequence: Synthetic oligonucleotide
  modified_base 1: mod_base = OTHER; note = 2'-O-methyladenosine-3'-phosphorothioate
  modified_base 2: mod_base = OTHER; note = 2'-O-methylguanosine-3'-phosphorothioate
  modified_base 3: mod_base = OTHER; note = 2'-O-methyluridine-3'-phosphate
  modified_base 4: mod_base = OTHER; note = 2'-O-methylguanosine-3'-phosphate
  modified_base 5: mod_base = OTHER; note = 2'-O-methylguanosine-3'-phosphate
  modified_base 6: mod_base = OTHER; note = 2'-O-methyladenosine-3'-phosphate
  modified_base 7: mod_base = OTHER; note = 2'-fluorocytidine-3'-phosphate
  modified_base 8: mod_base = OTHER; note = 2'-O-methyluridine-3'-phosphate
  modified_base 9: mod_base = OTHER; note = 2'-fluorouridine-3'-phosphate
  modified_base 10: mod_base = OTHER; note = 2'-fluoroguanosine-3'-phosphate
  modified_base 11: mod_base = OTHER; note = 2'-fluorocytidine-3'-phosphate
  modified_base 12: mod_base = OTHER; note = 2'-O-methyluridine-3'-phosphate
  modified_base 13: mod_base = OTHER; note = 2'-O-methylguanosine-3'-phosphate
  modified_base 14: mod_base = OTHER; note = 2'-O-methylcytidine-3'-phosphate
  modified_base 15: mod_base = OTHER; note = 2'-O-methyladenosine-3'-phosphate
  modified_base 16: mod_base = OTHER; note = 2'-O-methyluridine-3'-phosphate
  modified_base 17: mod_base = OTHER; note = 2'-O-methyladenosine-3'-phosphate
  modified_base 18: mod_base = OTHER; note = 2'-O-methyluridine-3'-phosphate
  modified_base 19: mod_base = OTHER; note = 2'-O-methylguanosine-3'-phosphate
  modified_base 20: mod_base = OTHER; note = 2'-O-methyluridine-3'-phosphate
  modified_base 21: mod_base = OTHER; note = 2'-O-methylguanosine-3'-phosphate N-[tris(GalNAc-alkyl)-amidodecanoyl)]-4-hydroxyprolinol Hyp-(GalNAc-alkyl)3
agtggacttgctgcatatgtg

SEQ ID NO: 2911 - RNA, 23 nt, synthetic construct
  source 1..23: mol_type = other RNA; note = Description of Artificial Sequence: Synthetic oligonucleotide
  modified_base 1: mod_base = OTHER; note = 2'-O-methylcytidine-3'-phosphorothioate
  modified_base 2: mod_base = OTHER; note = 2'-fluoroadenosine-3'-phosphorothioate
  modified_base 3: mod_base = OTHER; note = 2'-O-methylcytidine-3'-phosphate
  modified_base 4: mod_base = OTHER; note = 2'-O-methyladenosine-3'-phosphate
  modified_base 5: mod_base = OTHER; note = 2'-O-methyluridine-3'-phosphate
  modified_base 6: mod_base = OTHER; note = 2'-fluoroadenosine-3'-phosphate
  modified_base 7: mod_base = OTHER; note = 2'-O-methyluridine-3'-phosphate
  modified_base 8: mod_base = OTHER; note = 2'-fluoroguanosine-3'-phosphate
  modified_base 9: mod_base = OTHER; note = 2'-fluorocytidine-3'-phosphate
  modified_base 10: mod_base = OTHER; note = 2'-O-methyladenosine-3'-phosphate
  modified_base 11: mod_base = OTHER; note = 2'-O-methylguanosine-3'-phosphate
  modified_base 12: mod_base = OTHER; note = 2'-O-methylcytidine-3'-phosphate
  modified_base 13: mod_base = OTHER; note = 2'-O-methyladenosine-3'-phosphate
  modified_base 14: mod_base = OTHER; note = 2'-fluoroadenosine-3'-phosphate
  modified_base 15: mod_base = OTHER; note = 2'-O-methylguanosine-3'-phosphate
  modified_base 16: mod_base = OTHER; note = 2'-fluorouridine-3'-phosphate
  modified_base 17: mod_base = OTHER; note = 2'-O-methylcytidine-3'-phosphate
  modified_base 18: mod_base = OTHER; note = 2'-O-methylcytidine-3'-phosphate
  modified_base 19: mod_base = OTHER; note = 2'-O-methyladenosine-3'-phosphate
  modified_base 20: mod_base = OTHER; note = 2'-O-methylcytidine-3'-phosphate
  modified_base 21: mod_base = OTHER; note = 2'-O-methyluridine-3'-phosphorothioate
  modified_base 22: mod_base = OTHER; note = 2'-O-methylguanosine-3'-phosphorothioate
  modified_base 23: mod_base = OTHER; note = 2'-O-methyluridine-3'-phosphate
cacatatgcagcaagtccactgt

SEQ ID NO: 2912 - RNA, 21 nt, synthetic construct
  source 1..21: mol_type = other RNA; note = Description of Artificial Sequence: Synthetic oligonucleotide
  modified_base 1: mod_base = OTHER; note = 2'-O-methylcytidine-3'-phosphorothioate
  modified_base 2: mod_base = OTHER; note = 2'-O-methyladenosine-3'-phosphorothioate
  modified_base 3: mod_base = OTHER; note = 2'-O-methylguanosine-3'-phosphate
  modified_base 4: mod_base = OTHER; note = 2'-O-methyluridine-3'-phosphate
  modified_base 5: mod_base = OTHER; note = 2'-O-methylguanosine-3'-phosphate
  modified_base 6: mod_base = OTHER; note = 2'-O-methylguanosine-3'-phosphate
  modified_base 7: mod_base = OTHER; note = 2'-fluoroadenosine-3'-phosphate
  modified_base 8: mod_base = OTHER; note = 2'-O-methylcytidine-3'-phosphate
  modified_base 9: mod_base = OTHER; note = 2'-fluorouridine-3'-phosphate
  modified_base 10: mod_base = OTHER; note = 2'-fluorouridine-3'-phosphate
  modified_base 11: mod_base = OTHER; note = 2'-fluoroguanosine-3'-phosphate
  modified_base 12: mod_base = OTHER; note = 2'-O-methylcytidine-3'-phosphate
  modified_base 13: mod_base = OTHER; note = 2'-O-methyluridine-3'-phosphate
  modified_base 14: mod_base = OTHER; note = 2'-O-methylguanosine-3'-phosphate
  modified_base 15: mod_base = OTHER; note = 2'-O-methylcytidine-3'-phosphate
  modified_base 16: mod_base = OTHER; note = 2'-O-methyladenosine-3'-phosphate
  modified_base 17: mod_base = OTHER; note = 2'-O-methyluridine-3'-phosphate
  modified_base 18: mod_base = OTHER; note = 2'-O-methyladenosine-3'-phosphate
  modified_base 19: mod_base = OTHER; note = 2'-O-methyluridine-3'-phosphate
  modified_base 20: mod_base = OTHER; note = 2'-O-methylguanosine-3'-phosphate
  modified_base 21: mod_base = OTHER; note = 2'-O-methyluridine-3'-phosphate N-[tris(GalNAc-alkyl)-amidodecanoyl)]-4-hydroxyprolinol Hyp-(GalNAc-alkyl)3
cagtggacttgctgcatatgt

SEQ ID NO: 2913 - RNA, 23 nt, synthetic construct
  source 1..23: mol_type = other RNA; note = Description of Artificial Sequence: Synthetic oligonucleotide
  modified_base 1: mod_base = OTHER; note = 2'-O-methyladenosine-3'-phosphorothioate
  modified_base 2: mod_base = OTHER; note = 2'-fluorocytidine-3'-phosphorothioate
  modified_base 3: mod_base = OTHER; note = 2'-O-methyladenosine-3'-phosphate
  modified_base 4: mod_base = OTHER; note = 2'-O-methyluridine-3'-phosphate
  modified_base 5: mod_base = OTHER; note = 2'-O-methyladenosine-3'-phosphate
  modified_base 6: mod_base = OTHER; note = 2'-fluorouridine-3'-phosphate
  modified_base 7: mod_base = OTHER; note = 2'-O-methylguanosine-3'-phosphate
  modified_base 8: mod_base = OTHER; note = 2'-fluorocytidine-3'-phosphate
  modified_base 9: mod_base = OTHER; note = 2'-fluoroadenosine-3'-phosphate
  modified_base 10: mod_base = OTHER; note = 2'-O-methylguanosine-3'-phosphate
  modified_base 11: mod_base = OTHER; note = 2'-O-methylcytidine-3'-phosphate
  modified_base 12: mod_base = OTHER; note = 2'-O-methyladenosine-3'-phosphate
  modified_base 13: mod_base = OTHER; note = 2'-O-methyladenosine-3'-phosphate
  modified_base 14: mod_base = OTHER; note = 2'-fluoroguanosine-3'-phosphate
  modified_base 15: mod_base = OTHER; note = 2'-O-methyluridine-3'-phosphate
  modified_base 16: mod_base = OTHER; note = 2'-fluorocytidine-3'-phosphate
  modified_base 17: mod_base = OTHER; note = 2'-O-methylcytidine-3'-phosphate
  modified_base 18: mod_base = OTHER; note = 2'-O-methyladenosine-3'-phosphate
  modified_base 19: mod_base = OTHER; note = 2'-O-methylcytidine-3'-phosphate
  modified_base 20: mod_base = OTHER; note = 2'-O-methyluridine-3'-phosphate
  modified_base 21: mod_base = OTHER; note = 2'-O-methylguanosine-3'-phosphorothioate
  modified_base 22: mod_base = OTHER; note = 2'-O-methyluridine-3'-phosphorothioate
  modified_base 23: mod_base = OTHER; note = 2'-O-methylcytidine-3'-phosphate
acatatgcagcaagtccactgtc

SEQ ID NO: 2914 - RNA, 21 nt, synthetic construct
  source 1..21: mol_type = other RNA; note = Description of Artificial Sequence: Synthetic oligonucleotide
  modified_base 1: mod_base = OTHER; note = 2'-O-methyluridine-3'-phosphorothioate
  modified_base 2: mod_base = OTHER; note = 2'-O-methyladenosine-3'-phosphorothioate
  modified_base 3: mod_base = OTHER; note = 2'-O-methyladenosine-3'-phosphate
  modified_base 4: mod_base = OTHER; note = 2'-O-methyladenosine-3'-phosphate
  modified_base 5: mod_base = OTHER; note = 2'-O-methyluridine-3'-phosphate
  modified_base 6: mod_base = OTHER; note = 2'-O-methylcytidine-3'-phosphate
  modified_base 7: mod_base = OTHER; note = 2'-fluoroadenosine-3'-phosphate
  modified_base 8: mod_base = OTHER; note = 2'-O-methylguanosine-3'-phosphate
  modified_base 9: mod_base = OTHER; note = 2'-fluorouridine-3'-phosphate
  modified_base 10: mod_base = OTHER; note = 2'-fluoroadenosine-3'-phosphate
  modified_base 11: mod_base = OTHER; note = 2'-fluorocytidine-3'-phosphate
  modified_base 12: mod_base = OTHER; note = 2'-O-methyluridine-3'-phosphate
  modified_base 13: mod_base = OTHER; note = 2'-O-methyluridine-3'-phosphate
  modified_base 14: mod_base = OTHER; note = 2'-O-methylcytidine-3'-phosphate
  modified_base 15: mod_base = OTHER; note = 2'-O-methylcytidine-3'-phosphate
  modified_base 16: mod_base = OTHER; note = 2'-O-methyladenosine-3'-phosphate
  modified_base 17: mod_base = OTHER; note = 2'-O-methyladenosine-3'-phosphate
  modified_base 18: mod_base = OTHER; note = 2'-O-methyladenosine-3'-phosphate
  modified_base 19: mod_base = OTHER; note = 2'-O-methylguanosine-3'-phosphate
  modified_base 20: mod_base = OTHER; note = 2'-O-methyluridine-3'-phosphate
  modified_base 21: mod_base = OTHER; note = 2'-O-methylcytidine-3'-phosphate N-[tris(GalNAc-alkyl)-amidodecanoyl)]-4-hydroxyprolinol Hyp-(GalNAc-alkyl)3
taaatcagtacttccaaagtc

SEQ ID NO: 2915 - RNA, 23 nt, synthetic construct
  source 1..23: mol_type = other RNA; note = Description of Artificial Sequence: Synthetic oligonucleotide
  modified_base 1: mod_base = OTHER; note = 2'-O-methylguanosine-3'-phosphorothioate
  modified_base 2: mod_base = OTHER; note = 2'-fluoroadenosine-3'-phosphorothioate
  modified_base 3: mod_base = OTHER; note = 2'-O-methylcytidine-3'-phosphate
  modified_base 4: mod_base = OTHER; note = 2'-O-methyluridine-3'-phosphate
  modified_base 5: mod_base = OTHER; note = 2'-O-methyluridine-3'-phosphate
  modified_base 6: mod_base = OTHER; note = 2'-fluorouridine-3'-phosphate
  modified_base 7: mod_base = OTHER; note = 2'-O-methylguanosine-3'-phosphate
  modified_base 8: mod_base = OTHER; note = 2'-fluoroguanosine-3'-phosphate
  modified_base 9: mod_base = OTHER; note = 2'-fluoroadenosine-3'-phosphate
  modified_base 10: mod_base = OTHER; note = 2'-O-methyladenosine-3'-phosphate
  modified_base 11: mod_base = OTHER; note = 2'-O-methylguanosine-3'-phosphate
  modified_base 12: mod_base = OTHER; note = 2'-O-methyluridine-3'-phosphate
  modified_base 13: mod_base = OTHER; note = 2'-O-methyladenosine-3'-phosphate
  modified_base 14: mod_base = OTHER; note = 2'-fluorocytidine-3'-phosphate
  modified_base 15: mod_base = OTHER; note = 2'-O-methyluridine-3'-phosphate
  modified_base 16: mod_base = OTHER; note = 2'-fluoroguanosine-3'-phosphate
  modified_base 17: mod_base = OTHER; note = 2'-O-methyladenosine-3'-phosphate
  modified_base 18: mod_base = OTHER; note = 2'-O-methyluridine-3'-phosphate
  modified_base 19: mod_base = OTHER; note = 2'-O-methyluridine-3'-phosphate
  modified_base 20: mod_base = OTHER; note = 2'-O-methyluridine-3'-phosphate
  modified_base 21: mod_base = OTHER; note = 2'-O-methyladenosine-3'-phosphorothioate
  modified_base 22: mod_base = OTHER; note = 2'-O-methylguanosine-3'-phosphorothioate
  modified_base 23: mod_base = OTHER; note = 2'-O-methylcytidine-3'-phosphate
gactttggaagtactgatttagc

SEQ ID NO: 2916 - RNA, 21 nt, synthetic construct
  source 1..21: mol_type = other RNA; note = Description of Artificial Sequence: Synthetic oligonucleotide
  modified_base 1: mod_base = OTHER; note = 2'-O-methyladenosine-3'-phosphorothioate
  modified_base 2: mod_base = OTHER; note = 2'-O-methyladenosine-3'-phosphorothioate
  modified_base 3: mod_base = OTHER; note = 2'-O-methyladenosine-3'-phosphate
  modified_base 4: mod_base = OTHER; note = 2'-O-methyluridine-3'-phosphate
  modified_base 5: mod_base = OTHER; note = 2'-O-methylcytidine-3'-phosphate
  modified_base 6: mod_base = OTHER; note = 2'-O-methyladenosine-3'-phosphate
  modified_base 7: mod_base = OTHER; note = 2'-fluoroguanosine-3'-phosphate
  modified_base 8: mod_base = OTHER; note = 2'-O-methyluridine-3'-phosphate
  modified_base 9: mod_base = OTHER; note = 2'-fluoroadenosine-3'-phosphate
  modified_base 10: mod_base = OTHER; note = 2'-fluorocytidine-3'-phosphate
  modified_base 11: mod_base = OTHER; note = 2'-fluorouridine-3'-phosphate
  modified_base 12: mod_base = OTHER; note = 2'-O-methyluridine-3'-phosphate
  modified_base 13: mod_base = OTHER; note = 2'-O-methylcytidine-3'-phosphate
  modified_base 14: mod_base = OTHER; note = 2'-O-methylcytidine-3'-phosphate
  modified_base 15: mod_base = OTHER; note = 2'-O-methyladenosine-3'-phosphate
  modified_base 16: mod_base = OTHER; note = 2'-O-methyladenosine-3'-phosphate
  modified_base 17: mod_base = OTHER; note = 2'-O-methyladenosine-3'-phosphate
  modified_base 18: mod_base = OTHER; note = 2'-O-methylguanosine-3'-phosphate
  modified_base 19: mod_base = OTHER; note = 2'-O-methyluridine-3'-phosphate
  modified_base 20: mod_base = OTHER; note = 2'-O-methylcytidine-3'-phosphate
  modified_base 21: mod_base = OTHER; note = 2'-O-methyluridine-3'-phosphate N-[tris(GalNAc-alkyl)-amidodecanoyl)]-4-hydroxyprolinol Hyp-(GalNAc-alkyl)3
aaatcagtacttccaaagtct

SEQ ID NO: 2917 - RNA, 23 nt, synthetic construct
  source 1..23: mol_type = other RNA; note = Description of Artificial Sequence: Synthetic oligonucleotide
  modified_base 1: mod_base = OTHER; note = 2'-O-methyladenosine-3'-phosphorothioate
  modified_base 2: mod_base = OTHER; note = 2'-fluoroguanosine-3'-phosphorothioate
  modified_base 3: mod_base = OTHER; note = 2'-O-methyladenosine-3'-phosphate
  modified_base 4: mod_base = OTHER; note = 2'-O-methylcytidine-3'-phosphate
  modified_base 5: mod_base = OTHER; note = 2'-O-methyluridine-3'-phosphate
  modified_base 6: mod_base = OTHER; note = 2'-fluorouridine-3'-phosphate
  modified_base 7: mod_base = OTHER; note = 2'-O-methyluridine-3'-phosphate
  modified_base 8: mod_base = OTHER; note = 2'-fluoroguanosine-3'-phosphate
  modified_base 9: mod_base = OTHER; note = 2'-fluoroguanosine-3'-phosphate
  modified_base 10: mod_base = OTHER; note = 2'-O-methyladenosine-3'-phosphate
  modified_base 11: mod_base = OTHER; note = 2'-O-methyladenosine-3'-phosphate
  modified_base 12: mod_base = OTHER; note = 2'-O-methylguanosine-3'-phosphate
  modified_base 13: mod_base = OTHER; note = 2'-O-methyluridine-3'-phosphate
  modified_base 14: mod_base = OTHER; note = 2'-fluoroadenosine-3'-phosphate
  modified_base 15: mod_base = OTHER; note = 2'-O-methylcytidine-3'-phosphate
  modified_base 16: mod_base = OTHER; note = 2'-fluorouridine-3'-phosphate
  modified_base 17: mod_base = OTHER; note = 2'-O-methylguanosine-3'-phosphate
  modified_base 18: mod_base = OTHER; note = 2'-O-methyladenosine-3'-phosphate
  modified_base 19: mod_base = OTHER; note = 2'-O-methyluridine-3'-phosphate
  modified_base 20: mod_base = OTHER; note = 2'-O-methyluridine-3'-phosphate
  modified_base 21: mod_base = OTHER; note = 2'-O-methyluridine-3'-phosphorothioate
  modified_base 22: mod_base = OTHER; note = 2'-O-methyladenosine-3'-phosphorothioate
  modified_base 23: mod_base = OTHER; note = 2'-O-methylguanosine-3'-phosphate
agactttggaagtactgatttag

SEQ ID NO: 2918 - RNA, 21 nt, synthetic construct
  source 1..21: mol_type = other RNA; note = Description of Artificial Sequence: Synthetic oligonucleotide
  modified_base 1: mod_base = OTHER; note = 2'-O-methyladenosine-3'-phosphorothioate
  modified_base 2: mod_base = OTHER; note = 2'-O-methyluridine-3'-phosphorothioate
  modified_base 3: mod_base = OTHER; note = 2'-O-methylguanosine-3'-phosphate
  modified_base 4: mod_base = OTHER; note = 2'-O-methylcytidine-3'-phosphate
  modified_base 5: mod_base = OTHER; note = 2'-O-methyluridine-3'-phosphate
  modified_base 6: mod_base = OTHER; note = 2'-O-methyladenosine-3'-phosphate
  modified_base 7: mod_base = OTHER; note = 2'-fluoroadenosine-3'-phosphate
  modified_base 8: mod_base = OTHER; note = 2'-O-methyladenosine-3'-phosphate
  modified_base 9: mod_base = OTHER; note = 2'-fluorouridine-3'-phosphate
  modified_base 10: mod_base = OTHER; note = 2'-fluorocytidine-3'-phosphate
  modified_base 11: mod_base = OTHER; note = 2'-fluoroadenosine-3'-phosphate
  modified_base 12: mod_base = OTHER; note = 2'-O-methylguanosine-3'-phosphate
  modified_base 13: mod_base = OTHER; note = 2'-O-methyluridine-3'-phosphate
  modified_base 14: mod_base = OTHER; note = 2'-O-methyladenosine-3'-phosphate
  modified_base 15: mod_base = OTHER; note = 2'-O-methylcytidine-3'-phosphate
  modified_base 16: mod_base = OTHER; note = 2'-O-methyluridine-3'-phosphate
  modified_base 17: mod_base = OTHER; note = 2'-O-methyluridine-3'-phosphate
  modified_base 18: mod_base = OTHER; note = 2'-O-methylcytidine-3'-phosphate
  modified_base 19: mod_base = OTHER; note = 2'-O-methylcytidine-3'-phosphate
  modified_base 20: mod_base = OTHER; note = 2'-O-methyladenosine-3'-phosphate
  modified_base 21: mod_base = OTHER; note = 2'-O-methyladenosine-3'-phosphate N-[tris(GalNAc-alkyl)-amidodecanoyl)]-4-hydroxyprolinol Hyp-(GalNAc-alkyl)3
atgctaaatcagtacttccaa

SEQ ID NO: 2919 - RNA, 23 nt, synthetic construct
  source 1..23: mol_type = other RNA; note = Description of Artificial Sequence: Synthetic oligonucleotide
  modified_base 1: mod_base = OTHER; note = 2'-O-methyluridine-3'-phosphorothioate
  modified_base 2: mod_base = OTHER; note = 2'-fluorouridine -3'-phosphorothioate
  modified_base 3: mod_base = OTHER; note = 2'-O-methylguanosine-3'-phosphate
  modified_base 4: mod_base = OTHER; note = 2'-O-methylguanosine-3'-phosphate
  modified_base 5: mod_base = OTHER; note = 2'-O-methyladenosine-3'-phosphate
  modified_base 6: mod_base = OTHER; note = 2'-fluoroadenosine-3'-phosphate
  modified_base 7: mod_base = OTHER; note = 2'-O-methylguanosine-3'-phosphate
  modified_base 8: mod_base = OTHER; note = 2'-fluorouridine-3'-phosphate
  modified_base 9: mod_base = OTHER; note = 2'-fluoroadenosine-3'-phosphate
  modified_base 10: mod_base = OTHER; note = 2'-O-methylcytidine-3'-phosphate
  modified_base 11: mod_base = OTHER; note = 2'-O-methyluridine-3'-phosphate
  modified_base 12: mod_base = OTHER; note = 2'-O-methylguanosine-3'-phosphate
  modified_base 13: mod_base = OTHER; note = 2'-O-methyladenosine-3'-phosphate
  modified_base 14: mod_base = OTHER; note = 2'-fluorouridine-3'-phosphate
  modified_base 15: mod_base = OTHER; note = 2'-O-methyluridine-3'-phosphate
  modified_base 16: mod_base = OTHER; note = 2'-fluorouridine-3'-phosphate
  modified_base 17: mod_base = OTHER; note = 2'-O-methyladenosine-3'-phosphate
  modified_base 18: mod_base = OTHER; note = 2'-O-methylguanosine-3'-phosphate
  modified_base 19: mod_base = OTHER; note = 2'-O-methylcytidine-3'-phosphate
  modified_base 20: mod_base = OTHER; note = 2'-O-methyladenosine-3'-phosphate
  modified_base 21: mod_base = OTHER; note = 2'-O-methyluridine-3'-phosphorothioate
  modified_base 22: mod_base = OTHER; note = 2'-O-methylguanosine-3'-phosphorothioate
  modified_base 23: mod_base = OTHER; note = 2'-O-methyluridine-3'-phosphate
ttggaagtactgatttagcatgt

SEQ ID NO: 2920 - RNA, 21 nt, synthetic construct
  source 1..21: mol_type = other RNA; note = Description of Artificial Sequence: Synthetic oligonucleotide
  modified_base 1: mod_base = OTHER; note = 2'-O-methylcytidine-3'-phosphorothioate
  modified_base 2: mod_base = OTHER; note = 2'-O-methyladenosine-3'-phosphorothioate
  modified_base 3: mod_base = OTHER; note = 2'-O-methyluridine-3'-phosphate
  modified_base 4: mod_base = OTHER; note = 2'-O-methylguanosine-3'-phosphate
  modified_base 5: mod_base = OTHER; note = 2'-O-methylcytidine-3'-phosphate
  modified_base 6: mod_base = OTHER; note = 2'-O-methyluridine-3'-phosphate
  modified_base 7: mod_base = OTHER; note = 2'-fluoroadenosine-3'-phosphate
  modified_base 8: mod_base = OTHER; note = 2'-O-methyladenosine-3'-phosphate
  modified_base 9: mod_base = OTHER; note = 2'-fluoroadenosine-3'-phosphate
  modified_base 10: mod_base = OTHER; note = 2'-fluorouridine-3'-phosphate
  modified_base 11: mod_base = OTHER; note = 2'-fluorocytidine-3'-phosphate
  modified_base 12: mod_base = OTHER; note = 2'-O-methyladenosine-3'-phosphate
  modified_base 13: mod_base = OTHER; note = 2'-O-methylguanosine-3'-phosphate
  modified_base 14: mod_base = OTHER; note = 2'-O-methyluridine-3'-phosphate
  modified_base 15: mod_base = OTHER; note = 2'-O-methyladenosine-3'-phosphate
  modified_base 16: mod_base = OTHER; note = 2'-O-methylcytidine-3'-phosphate
  modified_base 17: mod_base = OTHER; note = 2'-O-methyluridine-3'-phosphate
  modified_base 18: mod_base = OTHER; note = 2'-O-methyluridine-3'-phosphate
  modified_base 19: mod_base = OTHER; note = 2'-O-methylcytidine-3'-phosphate
  modified_base 20: mod_base = OTHER; note = 2'-O-methylcytidine-3'-phosphate
  modified_base 21: mod_base = OTHER; note = 2'-O-methyladenosine-3'-phosphate N-[tris(GalNAc-alkyl)-amidodecanoyl)]-4-hydroxyprolinol Hyp-(GalNAc-alkyl)3
catgctaaatcagtacttcca

SEQ ID NO: 2921 - RNA, 23 nt, synthetic construct
  source 1..23: mol_type = other RNA; note = Description of Artificial Sequence: Synthetic oligonucleotide
  modified_base 1: mod_base = OTHER; note = 2'-O-methyluridine-3'-phosphorothioate
  modified_base 2: mod_base = OTHER; note = 2'-fluoroguanosine-3'-phosphorothioate
  modified_base 3: mod_base = OTHER; note = 2'-O-methylguanosine-3'-phosphate
  modified_base 4: mod_base = OTHER; note = 2'-O-methyladenosine-3'-phosphate
  modified_base 5: mod_base = OTHER; note = 2'-O-methyladenosine-3'-phosphate
  modified_base 6: mod_base = OTHER; note = 2'-fluoroguanosine-3'-phosphate
  modified_base 7: mod_base = OTHER; note = 2'-O-methyluridine-3'-phosphate
  modified_base 8: mod_base = OTHER; note = 2'-fluoroadenosine-3'-phosphate
  modified_base 9: mod_base = OTHER; note = 2'-fluorocytidine-3'-phosphate
  modified_base 10: mod_base = OTHER; note = 2'-O-methyluridine-3'-phosphate
  modified_base 11: mod_base = OTHER; note = 2'-O-methylguanosine-3'-phosphate
  modified_base 12: mod_base = OTHER; note = 2'-O-methyladenosine-3'-phosphate
  modified_base 13: mod_base = OTHER; note = 2'-O-methyluridine-3'-phosphate
  modified_base 14: mod_base = OTHER; note = 2'-fluorouridine-3'-phosphate
  modified_base 15: mod_base = OTHER; note = 2'-O-methyluridine-3'-phosphate
  modified_base 16: mod_base = OTHER; note = 2'-fluoroadenosine-3'-phosphate
  modified_base 17: mod_base = OTHER; note = 2'-O-methylguanosine-3'-phosphate
  modified_base 18: mod_base = OTHER; note = 2'-O-methylcytidine-3'-phosphate
  modified_base 19: mod_base = OTHER; note = 2'-O-methyladenosine-3'-phosphate
  modified_base 20: mod_base = OTHER; note = 2'-O-methyluridine-3'-phosphate
  modified_base 21: mod_base = OTHER; note = 2'-O-methylguanosine-3'-phosphorothioate
  modified_base 22: mod_base = OTHER; note = 2'-O-methyluridine-3'-phosphorothioate
  modified_base 23: mod_base = OTHER; note = 2'-O-methyluridine-3'-phosphate
tggaagtactgatttagcatgtt

SEQ ID NO: 2922 - RNA, 21 nt, synthetic construct
  source 1..21: mol_type = other RNA; note = Description of Artificial Sequence: Synthetic oligonucleotide
  modified_base 1: mod_base = OTHER; note = 2'-O-methyluridine-3'-phosphorothioate
  modified_base 2: mod_base = OTHER; note = 2'-O-methylcytidine-3'-phosphorothioate
  modified_base 3: mod_base = OTHER; note = 2'-O-methylcytidine-3'-phosphate
  modified_base 4: mod_base = OTHER; note = 2'-O-methyluridine-3'-phosphate
  modified_base 5: mod_base = OTHER; note = 2'-O-methylcytidine-3'-phosphate
  modified_base 6: mod_base = OTHER; note = 2'-O-methyladenosine-3'-phosphate
  modified_base 7: mod_base = OTHER; note = 2'-fluoroadenosine-3'-phosphate
  modified_base 8: mod_base = OTHER; note = 2'-O-methyluridine-3'-phosphate
  modified_base 9: mod_base = OTHER; note = 2'-fluorouridine-3'-phosphate
  modified_base 10: mod_base = OTHER; note = 2'-fluoroguanosine-3'-phosphate
  modified_base 11: mod_base = OTHER; note = 2'-fluoroadenosine-3'-phosphate
  modified_base 12: mod_base = OTHER; note = 2'-O-methyladenosine-3'-phosphate
  modified_base 13: mod_base = OTHER; note = 2'-O-methylguanosine-3'-phosphate
  modified_base 14: mod_base = OTHER; note = 2'-O-methyladenosine-3'-phosphate
  modified_base 15: mod_base = OTHER; note = 2'-O-methyladenosine-3'-phosphate
  modified_base 16: mod_base = OTHER; note = 2'-O-methylguanosine-3'-phosphate
  modified_base 17: mod_base = OTHER; note = 2'-O-methyluridine-3'-phosphate
  modified_base 18: mod_base = OTHER; note = 2'-O-methylguanosine-3'-phosphate
  modified_base 19: mod_base = OTHER; note = 2'-O-methylguanosine-3'-phosphate
  modified_base 20: mod_base = OTHER; note = 2'-O-methylcytidine-3'-phosphate
  modified_base 21: mod_base = OTHER; note = 2'-O-methylguanosine-3'-phosphate N-[tris(GalNAc-alkyl)-amidodecanoyl)]-4-hydroxyprolinol Hyp-(GalNAc-alkyl)3
tcctcaattgaagaagtggcg

SEQ ID NO: 2923 - RNA, 23 nt, synthetic construct
  source 1..23: mol_type = other RNA; note = Description of Artificial Sequence: Synthetic oligonucleotide
  modified_base 1: mod_base = OTHER; note = 2'-O-methylcytidine-3'-phosphorothioate
  modified_base 2: mod_base = OTHER; note = 2'-fluoroguanosine-3'-phosphorothioate
  modified_base 3: mod_base = OTHER; note = 2'-O-methylcytidine-3'-phosphate
  modified_base 4: mod_base = OTHER; note = 2'-O-methylcytidine-3'-phosphate
  modified_base 5: mod_base = OTHER; note = 2'-O-methyladenosine-3'-phosphate
  modified_base 6: mod_base = OTHER; note = 2'-fluorocytidine-3'-phosphate
  modified_base 7: mod_base = OTHER; note = 2'-O-methyluridine-3'-phosphate
  modified_base 8: mod_base = OTHER; note = 2'-fluorouridine-3'-phosphate
  modified_base 9: mod_base = OTHER; note = 2'-fluorocytidine-3'-phosphate
  modified_base 10: mod_base = OTHER; note = 2'-O-methyluridine-3'-phosphate
  modified_base 11: mod_base = OTHER; note = 2'-O-methyluridine-3'-phosphate
  modified_base 12: mod_base = OTHER; note = 2'-O-methylcytidine-3'-phosphate
  modified_base 13: mod_base = OTHER; note = 2'-O-methyladenosine-3'-phosphate
  modified_base 14: mod_base = OTHER; note = 2'-fluoroadenosine-3'-phosphate
  modified_base 15: mod_base = OTHER; note = 2'-O-methyluridine-3'-phosphate
  modified_base 16: mod_base = OTHER; note = 2'-fluorouridine-3'-phosphate
  modified_base 17: mod_base = OTHER; note = 2'-O-methylguanosine-3'-phosphate
  modified_base 18: mod_base = OTHER; note = 2'-O-methyladenosine-3'-phosphate
  modified_base 19: mod_base = OTHER; note = 2'-O-methylguanosine-3'-phosphate
  modified_base 20: mod_base = OTHER; note = 2'-O-methylguanosine-3'-phosphate
  modified_base 21: mod_base = OTHER; note = 2'-O-methyladenosine-3'-phosphorothioate
  modified_base 22: mod_base = OTHER; note = 2'-O-methylguanosine-3'-phosphorothioate
  modified_base 23: mod_base = OTHER; note = 2'-O-methylguanosine-3'-phosphate
cgccacttcttcaattgaggagg

SEQ ID NO: 2924 - RNA, 21 nt, synthetic construct
  source 1..21: mol_type = other RNA; note = Description of Artificial Sequence: Synthetic oligonucleotide
  modified_base 1: mod_base = OTHER; note = 2'-O-methylcytidine-3'-phosphorothioate
  modified_base 2: mod_base = OTHER; note = 2'-O-methylcytidine-3'-phosphorothioate
  modified_base 3: mod_base = OTHER; note = 2'-O-methyluridine-3'-phosphate
  modified_base 4: mod_base = OTHER; note = 2'-O-methylcytidine-3'-phosphate
  modified_base 5: mod_base = OTHER; note = 2'-O-methyladenosine-3'-phosphate
  modified_base 6: mod_base = OTHER; note = 2'-O-methyladenosine-3'-phosphate
  modified_base 7: mod_base = OTHER; note = 2'-fluorouridine-3'-phosphate
  modified_base 8: mod_base = OTHER; note = 2'-O-methyluridine-3'-phosphate
  modified_base 9: mod_base = OTHER; note = 2'-fluoroguanosine-3'-phosphate
  modified_base 10: mod_base = OTHER; note = 2'-fluoroadenosine-3'-phosphate
  modified_base 11: mod_base = OTHER; note = 2'-fluoroadenosine-3'-phosphate
  modified_base 12: mod_base = OTHER; note = 2'-O-methylguanosine-3'-phosphate
  modified_base 13: mod_base = OTHER; note = 2'-O-methyladenosine-3'-phosphate
  modified_base 14: mod_base = OTHER; note = 2'-O-methyladenosine-3'-phosphate
  modified_base 15: mod_base = OTHER; note = 2'-O-methylguanosine-3'-phosphate
  modified_base 16: mod_base = OTHER; note = 2'-O-methyluridine-3'-phosphate
  modified_base 17: mod_base = OTHER; note = 2'-O-methylguanosine-3'-phosphate
  modified_base 18: mod_base = OTHER; note = 2'-O-methylguanosine-3'-phosphate
  modified_base 19: mod_base = OTHER; note = 2'-O-methylcytidine-3'-phosphate
  modified_base 20: mod_base = OTHER; note = 2'-O-methylguanosine-3'-phosphate
  modified_base 21: mod_base = OTHER; note = 2'-O-methylguanosine-3'-phosphate N-[tris(GalNAc-alkyl)-amidodecanoyl)]-4-hydroxyprolinol Hyp-(GalNAc-alkyl)3
cctcaattgaagaagtggcgg

SEQ ID NO: 2925 - RNA, 23 nt, synthetic construct
  source 1..23: mol_type = other RNA; note = Description of Artificial Sequence: Synthetic oligonucleotide
  modified_base 1: mod_base = OTHER; note = 2'-O-methylcytidine-3'-phosphorothioate
  modified_base 2: mod_base = OTHER; note = 2'-fluorocytidine-3'-phosphorothioate
  modified_base 3: mod_base = OTHER; note = 2'-O-methylguanosine-3'-phosphate
  modified_base 4: mod_base = OTHER; note = 2'-O-methylcytidine-3'-phosphate
  modified_base 5: mod_base = OTHER; note = 2'-O-methylcytidine-3'-phosphate
  modified_base 6: mod_base = OTHER; note = 2'-fluoroadenosine-3'-phosphate
  modified_base 7: mod_base = OTHER; note = 2'-O-methylcytidine-3'-phosphate
  modified_base 8: mod_base = OTHER; note = 2'-fluorouridine-3'-phosphate
  modified_base 9: mod_base = OTHER; note = 2'-fluorouridine-3'-phosphate
  modified_base 10: mod_base = OTHER; note = 2'-O-methylcytidine-3'-phosphate
  modified_base 11: mod_base = OTHER; note = 2'-O-methyluridine-3'-phosphate
  modified_base 12: mod_base = OTHER; note = 2'-O-methyluridine-3'-phosphate
  modified_base 13: mod_base = OTHER; note = 2'-O-methylcytidine-3'-phosphate
  modified_base 14: mod_base = OTHER; note = 2'-fluoroadenosine-3'-phosphate
  modified_base 15: mod_base = OTHER; note = 2'-O-methyladenosine-3'-phosphate
  modified_base 16: mod_base = OTHER; note = 2'-fluorouridine-3'-phosphate
  modified_base 17: mod_base = OTHER; note = 2'-O-methyluridine-3'-phosphate
  modified_base 18: mod_base = OTHER; note = 2'-O-methylguanosine-3'-phosphate
  modified_base 19: mod_base = OTHER; note = 2'-O-methyladenosine-3'-phosphate
  modified_base 20: mod_base = OTHER; note = 2'-O-methylguanosine-3'-phosphate
  modified_base 21: mod_base = OTHER; note = 2'-O-methylguanosine-3'-phosphorothioate
  modified_base 22: mod_base = OTHER; note = 2'-O-methyladenosine-3'-phosphorothioate
  modified_base 23: mod_base = OTHER; note = 2'-O-methylguanosine-3'-phosphate
ccgccacttcttcaattgaggag

SEQ ID NO: 2926 - RNA, 21 nt, synthetic construct
  source 1..21: mol_type = other RNA; note = Description of Artificial Sequence: Synthetic oligonucleotide
  modified_base 1: mod_base = OTHER; note = 2'-O-methylcytidine-3'-phosphorothioate
  modified_base 2: mod_base = OTHER; note = 2'-O-methyladenosine-3'-phosphorothioate
  modified_base 3: mod_base = OTHER; note = 2'-O-methylcytidine-3'-phosphate
  modified_base 4: mod_base = OTHER; note = 2'-O-methylcytidine-3'-phosphate
  modified_base 5: mod_base = OTHER; note = 2'-O-methyluridine-3'-phosphate
  modified_base 6: mod_base = OTHER; note = 2'-O-methylcytidine-3'-phosphate
  modified_base 7: mod_base = OTHER; note = 2'-fluorocytidine-3'-phosphate
  modified_base 8: mod_base = OTHER; note = 2'-O-methyluridine-3'-phosphate
  modified_base 9: mod_base = OTHER; note = 2'-fluorocytidine-3'-phosphate
  modified_base 10: mod_base = OTHER; note = 2'-fluoroadenosine-3'-phosphate
  modified_base 11: mod_base = OTHER; note = 2'-fluoroadenosine-3'-phosphate
  modified_base 12: mod_base = OTHER; note = 2'-O-methyluridine-3'-phosphate
  modified_base 13: mod_base = OTHER; note = 2'-O-methyluridine-3'-phosphate
  modified_base 14: mod_base = OTHER; note = 2'-O-methylguanosine-3'-phosphate
  modified_base 15: mod_base = OTHER; note = 2'-O-methyladenosine-3'-phosphate
  modified_base 16: mod_base = OTHER; note = 2'-O-methyladenosine-3'-phosphate
  modified_base 17: mod_base = OTHER; note = 2'-O-methylguanosine-3'-phosphate
  modified_base 18: mod_base = OTHER; note = 2'-O-methyladenosine-3'-phosphate
  modified_base 19: mod_base = OTHER; note = 2'-O-methyladenosine-3'-phosphate
  modified_base 20: mod_base = OTHER; note = 2'-O-methylguanosine-3'-phosphate
  modified_base 21: mod_base = OTHER; note = 2'-O-methyluridine-3'-phosphate N-[tris(GalNAc-alkyl)-amidodecanoyl)]-4-hydroxyprolinol Hyp-(GalNAc-alkyl)3
cacctcctcaattgaagaagt

SEQ ID NO: 2927 - RNA, 23 nt, synthetic construct
  source 1..23: mol_type = other RNA; note = Description of Artificial Sequence: Synthetic oligonucleotide
  modified_base 1: mod_base = OTHER; note = 2'-O-methyladenosine-3'-phosphorothioate
  modified_base 2: mod_base = OTHER; note = 2'-fluorocytidine-3'-phosphorothioate
  modified_base 3: mod_base = OTHER; note = 2'-O-methyluridine-3'-phosphate
  modified_base 4: mod_base = OTHER; note = 2'-O-methyluridine-3'-phosphate
  modified_base 5: mod_base = OTHER; note = 2'-O-methylcytidine-3'-phosphate
  modified_base 6: mod_base = OTHER; note = 2'-fluorouridine-3'-phosphate
  modified_base 7: mod_base = OTHER; note = 2'-O-methyluridine-3'-phosphate
  modified_base 8: mod_base = OTHER; note = 2'-fluorocytidine-3'-phosphate
  modified_base 9: mod_base = OTHER; note = 2'-fluoroadenosine-3'-phosphate
  modified_base 10: mod_base = OTHER; note = 2'-O-methyladenosine-3'-phosphate
  modified_base 11: mod_base = OTHER; note = 2'-O-methyluridine-3'-phosphate
  modified_base 12: mod_base = OTHER; note = 2'-O-methyluridine-3'-phosphate
  modified_base 13: mod_base = OTHER; note = 2'-O-methylguanosine-3'-phosphate
  modified_base 14: mod_base = OTHER; note = 2'-fluoroadenosine-3'-phosphate
  modified_base 15: mod_base = OTHER; note = 2'-O-methylguanosine-3'-phosphate
  modified_base 16: mod_base = OTHER; note = 2'-fluoroguanosine-3'-phosphate
  modified_base 17: mod_base = OTHER; note = 2'-O-methyladenosine-3'-phosphate
  modified_base 18: mod_base = OTHER; note = 2'-O-methylguanosine-3'-phosphate
  modified_base 19: mod_base = OTHER; note = 2'-O-methylguanosine-3'-phosphate
  modified_base 20: mod_base = OTHER; note = 2'-O-methyluridine-3'-phosphate
  modified_base 21: mod_base = OTHER; note = 2'-O-methylguanosine-3'-phosphorothioate
  modified_base 22: mod_base = OTHER; note = 2'-O-methylguanosine-3'-phosphorothioate
  modified_base 23: mod_base = OTHER; note = 2'-O-methylcytidine-3'-phosphate
acttcttcaattgaggaggtggc

SEQ ID NO: 2928 - RNA, 21 nt, synthetic construct
  source 1..21: mol_type = other RNA; note = Description of Artificial Sequence: Synthetic oligonucleotide
  modified_base 1: mod_base = OTHER; note = 2'-O-methylcytidine-3'-phosphorothioate
  modified_base 2: mod_base = OTHER; note = 2'-O-methylcytidine-3'-phosphorothioate
  modified_base 3: mod_base = OTHER; note = 2'-O-methyladenosine-3'-phosphate
  modified_base 4: mod_base = OTHER; note = 2'-O-methylcytidine-3'-phosphate
  modified_base 5: mod_base = OTHER; note = 2'-O-methylcytidine-3'-phosphate
  modified_base 6: mod_base = OTHER; note = 2'-O-methyluridine-3'-phosphate
  modified_base 7: mod_base = OTHER; note = 2'-fluorocytidine-3'-phosphate
  modified_base 8: mod_base = OTHER; note = 2'-O-methylcytidine-3'-phosphate
  modified_base 9: mod_base = OTHER; note = 2'-fluorouridine-3'-phosphate
  modified_base 10: mod_base = OTHER; note = 2'-fluorocytidine-3'-phosphate
  modified_base 11: mod_base = OTHER; note = 2'-fluoroadenosine-3'-phosphate
  modified_base 12: mod_base = OTHER; note = 2'-O-methyladenosine-3'-phosphate
  modified_base 13: mod_base = OTHER; note = 2'-O-methyluridine-3'-phosphate
  modified_base 14: mod_base = OTHER; note = 2'-O-methyluridine-3'-phosphate
  modified_base 15: mod_base = OTHER; note = 2'-O-methylguanosine-3'-phosphate
  modified_base 16: mod_base = OTHER; note = 2'-O-methyladenosine-3'-phosphate
  modified_base 17: mod_base = OTHER; note = 2'-O-methyladenosine-3'-phosphate
  modified_base 18: mod_base = OTHER; note = 2'-O-methylguanosine-3'-phosphate
  modified_base 19: mod_base = OTHER; note = 2'-O-methyladenosine-3'-phosphate
  modified_base 20: mod_base = OTHER; note = 2'-O-methyladenosine-3'-phosphate
  modified_base 21: mod_base = OTHER; note = 2'-O-methylguanosine-3'-phosphate N-[tris(GalNAc-alkyl)-amidodecanoyl)]-4-hydroxyprolinol Hyp-(GalNAc-alkyl)3
ccacctcctcaattgaagaag

SEQ ID NO: 2929 - RNA, 23 nt, synthetic construct
  source 1..23: mol_type = other RNA; note = Description of Artificial Sequence: Synthetic oligonucleotide
  modified_base 1: mod_base = OTHER; note = 2'-O-methylcytidine-3'-phosphorothioate
  modified_base 2: mod_base = OTHER; note = 2'-fluorouridine -3'-phosphorothioate
  modified_base 3: mod_base = OTHER; note = 2'-O-methyluridine-3'-phosphate
  modified_base 4: mod_base = OTHER; note = 2'-O-methylcytidine-3'-phosphate
  modified_base 5: mod_base = OTHER; note = 2'-O-methyluridine-3'-phosphate
  modified_base 6: mod_base = OTHER; note = 2'-fluorouridine-3'-phosphate
  modified_base 7: mod_base = OTHER; note = 2'-O-methylcytidine-3'-phosphate
  modified_base 8: mod_base = OTHER; note = 2'-fluoroadenosine-3'-phosphate
  modified_base 9: mod_base = OTHER; note = 2'-fluoroadenosine-3'-phosphate
  modified_base 10: mod_base = OTHER; note = 2'-O-methyluridine-3'-phosphate
  modified_base 11: mod_base = OTHER; note = 2'-O-methyluridine-3'-phosphate
  modified_base 12: mod_base = OTHER; note = 2'-O-methylguanosine-3'-phosphate
  modified_base 13: mod_base = OTHER; note = 2'-O-methyladenosine-3'-phosphate
  modified_base 14: mod_base = OTHER; note = 2'-fluoroguanosine-3'-phosphate
  modified_base 15: mod_base = OTHER; note = 2'-O-methylguanosine-3'-phosphate
  modified_base 16: mod_base = OTHER; note = 2'-fluoroadenosine-3'-phosphate
  modified_base 17: mod_base = OTHER; note = 2'-O-methylguanosine-3'-phosphate
  modified_base 18: mod_base = OTHER; note = 2'-O-methylguanosine-3'-phosphate
  modified_base 19: mod_base = OTHER; note = 2'-O-methyluridine-3'-phosphate
  modified_base 20: mod_base = OTHER; note = 2'-O-methylguanosine-3'-phosphate
  modified_base 21: mod_base = OTHER; note = 2'-O-methylguanosine-3'-phosphorothioate
  modified_base 22: mod_base = OTHER; note = 2'-O-methylcytidine-3'-phosphorothioate
  modified_base 23: mod_base = OTHER; note = 2'-O-methylcytidine-3'-phosphate
cttcttcaattgaggaggtggcc

SEQ ID NO: 2930 - RNA, 21 nt, synthetic construct
  source 1..21: mol_type = other RNA; note = Description of Artificial Sequence: Synthetic oligonucleotide
  modified_base 1: mod_base = OTHER; note = 2'-O-methylcytidine-3'-phosphorothioate
  modified_base 2: mod_base = OTHER; note = 2'-O-methyladenosine-3'-phosphorothioate
  modified_base 3: mod_base = OTHER; note = 2'-O-methyladenosine-3'-phosphate
  modified_base 4: mod_base = OTHER; note = 2'-O-methylguanosine-3'-phosphate
  modified_base 5: mod_base = OTHER; note = 2'-O-methyladenosine-3'-phosphate
  modified_base 6: mod_base = OTHER; note = 2'-O-methyluridine-3'-phosphate
  modified_base 7: mod_base = OTHER; note = 2'-fluoroguanosine-3'-phosphate
  modified_base 8: mod_base = OTHER; note = 2'-O-methyluridine-3'-phosphate
  modified_base 9: mod_base = OTHER; note = 2'-fluorocytidine-3'-phosphate
  modified_base 10: mod_base = OTHER; note = 2'-fluorocytidine-3'-phosphate
  modified_base 11: mod_base = OTHER; note = 2'-fluorouridine-3'-phosphate
  modified_base 12: mod_base = OTHER; note = 2'-O-methylcytidine-3'-phosphate
  modified_base 13: mod_base = OTHER; note = 2'-O-methylguanosine-3'-phosphate
  modified_base 14: mod_base = OTHER; note = 2'-O-methyladenosine-3'-phosphate
  modified_base 15: mod_base = OTHER; note = 2'-O-methylguanosine-3'-phosphate
  modified_base 16: mod_base = OTHER; note = 2'-O-methyladenosine-3'-phosphate
  modified_base 17: mod_base = OTHER; note = 2'-O-methyluridine-3'-phosphate
  modified_base 18: mod_base = OTHER; note = 2'-O-methyladenosine-3'-phosphate
  modified_base 19: mod_base = OTHER; note = 2'-O-methylcytidine-3'-phosphate
  modified_base 20: mod_base = OTHER; note = 2'-O-methyluridine-3'-phosphate
  modified_base 21: mod_base = OTHER; note = 2'-O-methyladenosine-3'-phosphate N-[tris(GalNAc-alkyl)-amidodecanoyl)]-4-hydroxyprolinol Hyp-(GalNAc-alkyl)3
caagatgtcctcgagatacta

SEQ ID NO: 2931 - RNA, 23 nt, synthetic construct
  source 1..23: mol_type = other RNA; note = Description of Artificial Sequence: Synthetic oligonucleotide
  modified_base 1: mod_base = OTHER; note = 2'-O-methyluridine-3'-phosphorothioate
  modified_base 2: mod_base = OTHER; note = 2'-fluoroadenosine-3'-phosphorothioate
  modified_base 3: mod_base = OTHER; note = 2'-O-methylguanosine-3'-phosphate
  modified_base 4: mod_base = OTHER; note = 2'-O-methyluridine-3'-phosphate
  modified_base 5: mod_base = OTHER; note = 2'-O-methyladenosine-3'-phosphate
  modified_base 6: mod_base = OTHER; note = 2'-fluorouridine-3'-phosphate
  modified_base 7: mod_base = OTHER; note = 2'-O-methylcytidine-3'-phosphate
  modified_base 8: mod_base = OTHER; note = 2'-fluorouridine-3'-phosphate
  modified_base 9: mod_base = OTHER; note = 2'-fluorocytidine-3'-phosphate
  modified_base 10: mod_base = OTHER; note = 2'-O-methylguanosine-3'-phosphate
  modified_base 11: mod_base = OTHER; note = 2'-O-methyladenosine-3'-phosphate
  modified_base 12: mod_base = OTHER; note = 2'-O-methylguanosine-3'-phosphate
  modified_base 13: mod_base = OTHER; note = 2'-O-methylguanosine-3'-phosphate
  modified_base 14: mod_base = OTHER; note = 2'-fluoroadenosine-3'-phosphate
  modified_base 15: mod_base = OTHER; note = 2'-O-methylcytidine-3'-phosphate
  modified_base 16: mod_base = OTHER; note = 2'-fluoroadenosine-3'-phosphate
  modified_base 17: mod_base = OTHER; note = 2'-O-methyluridine-3'-phosphate
  modified_base 18: mod_base = OTHER; note = 2'-O-methylcytidine-3'-phosphate
  modified_base 19: mod_base = OTHER; note = 2'-O-methyluridine-3'-phosphate
  modified_base 20: mod_base = OTHER; note = 2'-O-methyluridine-3'-phosphate
  modified_base 21: mod_base = OTHER; note = 2'-O-methylguanosine-3'-phosphorothioate
  modified_base 22: mod_base = OTHER; note = 2'-O-methyladenosine-3'-phosphorothioate
  modified_base 23: mod_base = OTHER; note = 2'-O-methyladenosine-3'-phosphate
tagtatctcgaggacatcttgaa

SEQ ID NO: 2932 - RNA, 21 nt, synthetic construct
  source 1..21: mol_type = other RNA; note = Description of Artificial Sequence: Synthetic oligonucleotide
  modified_base 1: mod_base = OTHER; note = 2'-O-methyladenosine-3'-phosphorothioate
  modified_base 2: mod_base = OTHER; note = 2'-O-methyladenosine-3'-phosphorothioate
  modified_base 3: mod_base = OTHER; note = 2'-O-methylguanosine-3'-phosphate
  modified_base 4: mod_base = OTHER; note = 2'-O-methyladenosine-3'-phosphate
  modified_base 5: mod_base = OTHER; note = 2'-O-methyluridine-3'-phosphate
  modified_base 6: mod_base = OTHER; note = 2'-O-methylguanosine-3'-phosphate
  modified_base 7: mod_base = OTHER; note = 2'-fluorouridine-3'-phosphate
  modified_base 8: mod_base = OTHER; note = 2'-O-methylcytidine-3'-phosphate
  modified_base 9: mod_base = OTHER; note = 2'-fluorocytidine-3'-phosphate
  modified_base 10: mod_base = OTHER; note = 2'-fluorouridine-3'-phosphate
  modified_base 11: mod_base = OTHER; note = 2'-fluorocytidine-3'-phosphate
  modified_base 12: mod_base = OTHER; note = 2'-O-methylguanosine-3'-phosphate
  modified_base 13: mod_base = OTHER; note = 2'-O-methyladenosine-3'-phosphate
  modified_base 14: mod_base = OTHER; note = 2'-O-methylguanosine-3'-phosphate
  modified_base 15: mod_base = OTHER; note = 2'-O-methyladenosine-3'-phosphate
  modified_base 16: mod_base = OTHER; note = 2'-O-methyluridine-3'-phosphate
  modified_base 17: mod_base = OTHER; note = 2'-O-methyladenosine-3'-phosphate
  modified_base 18: mod_base = OTHER; note = 2'-O-methylcytidine-3'-phosphate
  modified_base 19: mod_base = OTHER; note = 2'-O-methyluridine-3'-phosphate
  modified_base 20: mod_base = OTHER; note = 2'-O-methyladenosine-3'-phosphate
  modified_base 21: mod_base = OTHER; note = 2'-O-methyladenosine-3'-phosphate N-[tris(GalNAc-alkyl)-amidodecanoyl)]-4-hydroxyprolinol Hyp-(GalNAc-alkyl)3
aagatgtcctcgagatactaa

SEQ ID NO: 2933 - RNA, 23 nt, synthetic construct
  source 1..23: mol_type = other RNA; note = Description of Artificial Sequence: Synthetic oligonucleotide
  modified_base 1: mod_base = OTHER; note = 2'-O-methyluridine-3'-phosphorothioate
  modified_base 2: mod_base = OTHER; note = 2'-fluorouridine -3'-phosphorothioate
  modified_base 3: mod_base = OTHER; note = 2'-O-methyladenosine-3'-phosphate
  modified_base 4: mod_base = OTHER; note = 2'-O-methylguanosine-3'-phosphate
  modified_base 5: mod_base = OTHER; note = 2'-O-methyluridine-3'-phosphate
  modified_base 6: mod_base = OTHER; note = 2'-fluoroadenosine-3'-phosphate
  modified_base 7: mod_base = OTHER; note = 2'-O-methyluridine-3'-phosphate
  modified_base 8: mod_base = OTHER; note = 2'-fluorocytidine-3'-phosphate
  modified_base 9: mod_base = OTHER; note = 2'-fluorouridine-3'-phosphate
  modified_base 10: mod_base = OTHER; note = 2'-O-methylcytidine-3'-phosphate
  modified_base 11: mod_base = OTHER; note = 2'-O-methylguanosine-3'-phosphate
  modified_base 12: mod_base = OTHER; note = 2'-O-methyladenosine-3'-phosphate
  modified_base 13: mod_base = OTHER; note = 2'-O-methylguanosine-3'-phosphate
  modified_base 14: mod_base = OTHER; note = 2'-fluoroguanosine-3'-phosphate
  modified_base 15: mod_base = OTHER; note = 2'-O-methyladenosine-3'-phosphate
  modified_base 16: mod_base = OTHER; note = 2'-fluorocytidine-3'-phosphate
  modified_base 17: mod_base = OTHER; note = 2'-O-methyladenosine-3'-phosphate
  modified_base 18: mod_base = OTHER; note = 2'-O-methyluridine-3'-phosphate
  modified_base 19: mod_base = OTHER; note = 2'-O-methylcytidine-3'-phosphate
  modified_base 20: mod_base = OTHER; note = 2'-O-methyluridine-3'-phosphate
  modified_base 21: mod_base = OTHER; note = 2'-O-methyluridine-3'-phosphorothioate
  modified_base 22: mod_base = OTHER; note = 2'-O-methylguanosine-3'-phosphorothioate
  modified_base 23: mod_base = OTHER; note = 2'-O-methyladenosine-3'-phosphate
ttagtatctcgaggacatcttga

SEQ ID NO: 2934 - RNA, 21 nt, synthetic construct
  source 1..21: mol_type = other RNA; note = Description of Artificial Sequence: Synthetic oligonucleotide
  modified_base 1: mod_base = OTHER; note = 2'-O-methyluridine-3'-phosphorothioate
  modified_base 2: mod_base = OTHER; note = 2'-O-methylguanosine-3'-phosphorothioate
  modified_base 3: mod_base = OTHER; note = 2'-O-methyluridine-3'-phosphate
  modified_base 4: mod_base = OTHER; note = 2'-O-methyluridine-3'-phosphate
  modified_base 5: mod_base = OTHER; note = 2'-O-methylcytidine-3'-phosphate
  modified_base 6: mod_base = OTHER; note = 2'-O-methyladenosine-3'-phosphate
  modified_base 7: mod_base = OTHER; note = 2'-fluoroadenosine-3'-phosphate
  modified_base 8: mod_base = OTHER; note = 2'-O-methylguanosine-3'-phosphate
  modified_base 9: mod_base = OTHER; note = 2'-fluoroadenosine-3'-phosphate
  modified_base 10: mod_base = OTHER; note = 2'-fluorouridine-3'-phosphate
  modified_base 11: mod_base = OTHER; note = 2'-fluoroguanosine-3'-phosphate
  modified_base 12: mod_base = OTHER; note = 2'-O-methyluridine-3'-phosphate
  modified_base 13: mod_base = OTHER; note = 2'-O-methylcytidine-3'-phosphate
  modified_base 14: mod_base = OTHER; note = 2'-O-methylcytidine-3'-phosphate
  modified_base 15: mod_base = OTHER; note = 2'-O-methyluridine-3'-phosphate
  modified_base 16: mod_base = OTHER; note = 2'-O-methylcytidine-3'-phosphate
  modified_base 17: mod_base = OTHER; note = 2'-O-methylguanosine-3'-phosphate
  modified_base 18: mod_base = OTHER; note = 2'-O-methyladenosine-3'-phosphate
  modified_base 19: mod_base = OTHER; note = 2'-O-methylguanosine-3'-phosphate
  modified_base 20: mod_base = OTHER; note = 2'-O-methyladenosine-3'-phosphate
  modified_base 21: mod_base = OTHER; note = 2'-O-methyluridine-3'-phosphate N-[tris(GalNAc-alkyl)-amidodecanoyl)]-4-hydroxyprolinol Hyp-(GalNAc-alkyl)3
tgttcaagatgtcctcgagat

SEQ ID NO: 2935 - RNA, 23 nt, synthetic construct
  source 1..23: mol_type = other RNA; note = Description of Artificial Sequence: Synthetic oligonucleotide
  modified_base 1: mod_base = OTHER; note = 2'-O-methyladenosine-3'-phosphorothioate
  modified_base 2: mod_base = OTHER; note = 2'-fluorouridine -3'-phosphorothioate
  modified_base 3: mod_base = OTHER; note = 2'-O-methylcytidine-3'-phosphate
  modified_base 4: mod_base = OTHER; note = 2'-O-methyluridine-3'-phosphate
  modified_base 5: mod_base = OTHER; note = 2'-O-methylcytidine-3'-phosphate
  modified_base 6: mod_base = OTHER; note = 2'-fluoroguanosine-3'-phosphate
  modified_base 7: mod_base = OTHER; note = 2'-O-methyladenosine-3'-phosphate
  modified_base 8: mod_base = OTHER; note = 2'-fluoroguanosine-3'-phosphate
  modified_base 9: mod_base = OTHER; note = 2'-fluoroguanosine-3'-phosphate
  modified_base 10: mod_base = OTHER; note = 2'-O-methyladenosine-3'-phosphate
  modified_base 11: mod_base = OTHER; note = 2'-O-methylcytidine-3'-phosphate
  modified_base 12: mod_base = OTHER; note = 2'-O-methyladenosine-3'-phosphate
  modified_base 13: mod_base = OTHER; note = 2'-O-methyluridine-3'-phosphate
  modified_base 14: mod_base = OTHER; note = 2'-fluorocytidine-3'-phosphate
  modified_base 15: mod_base = OTHER; note = 2'-O-methyluridine-3'-phosphate
  modified_base 16: mod_base = OTHER; note = 2'-fluorouridine-3'-phosphate
  modified_base 17: mod_base = OTHER; note = 2'-O-methylguanosine-3'-phosphate
  modified_base 18: mod_base = OTHER; note = 2'-O-methyladenosine-3'-phosphate
  modified_base 19: mod_base = OTHER; note = 2'-O-methyladenosine-3'-phosphate
  modified_base 20: mod_base = OTHER; note = 2'-O-methylcytidine-3'-phosphate
  modified_base 21: mod_base = OTHER; note = 2'-O-methyladenosine-3'-phosphorothioate
  modified_base 22: mod_base = OTHER; note = 2'-O-methylcytidine-3'-phosphorothioate
  modified_base 23: mod_base = OTHER; note = 2'-O-methylcytidine-3'-phosphate
atctcgaggacatcttgaacacc

SEQ ID NO: 2936 - RNA, 21 nt, synthetic construct
  source 1..21: mol_type = other RNA; note = Description of Artificial Sequence: Synthetic oligonucleotide
  modified_base 1: mod_base = OTHER; note = 2'-O-methylguanosine-3'-phosphorothioate
  modified_base 2: mod_base = OTHER; note = 2'-O-methyluridine-3'-phosphorothioate
  modified_base 3: mod_base = OTHER; note = 2'-O-methylguanosine-3'-phosphate
  modified_base 4: mod_base = OTHER; note = 2'-O-methyluridine-3'-phosphate
  modified_base 5: mod_base = OTHER; note = 2'-O-methyluridine-3'-phosphate
  modified_base 6: mod_base = OTHER; note = 2'-O-methylcytidine-3'-phosphate
  modified_base 7: mod_base = OTHER; note = 2'-fluoroadenosine-3'-phosphate
  modified_base 8: mod_base = OTHER; note = 2'-O-methyladenosine-3'-phosphate
  modified_base 9: mod_base = OTHER; note = 2'-fluoroguanosine-3'-phosphate
  modified_base 10: mod_base = OTHER; note = 2'-fluoroadenosine-3'-phosphate
  modified_base 11: mod_base = OTHER; note = 2'-fluorouridine-3'-phosphate
  modified_base 12: mod_base = OTHER; note = 2'-O-methylguanosine-3'-phosphate
  modified_base 13: mod_base = OTHER; note = 2'-O-methyluridine-3'-phosphate
  modified_base 14: mod_base = OTHER; note = 2'-O-methylcytidine-3'-phosphate
  modified_base 15: mod_base = OTHER; note = 2'-O-methylcytidine-3'-phosphate
  modified_base 16: mod_base = OTHER; note = 2'-O-methyluridine-3'-phosphate
  modified_base 17: mod_base = OTHER; note = 2'-O-methylcytidine-3'-phosphate
  modified_base 18: mod_base = OTHER; note = 2'-O-methylguanosine-3'-phosphate
  modified_base 19: mod_base = OTHER; note = 2'-O-methyladenosine-3'-phosphate
  modified_base 20: mod_base = OTHER; note = 2'-O-methylguanosine-3'-phosphate
  modified_base 21: mod_base = OTHER; note = 2'-O-methyladenosine-3'-phosphate N-[tris(GalNAc-alkyl)-amidodecanoyl)]-4-hydroxyprolinol Hyp-(GalNAc-alkyl)3
gtgttcaagatgtcctcgaga

SEQ ID NO: 2937 - RNA, 23 nt, synthetic construct
  source 1..23: mol_type = other RNA; note = Description of Artificial Sequence: Synthetic oligonucleotide
  modified_base 1: mod_base = OTHER; note = 2'-O-methyluridine-3'-phosphorothioate
  modified_base 2: mod_base = OTHER; note = 2'-fluorocytidine-3'-phosphorothioate
  modified_base 3: mod_base = OTHER; note = 2'-O-methyluridine-3'-phosphate
  modified_base 4: mod_base = OTHER; note = 2'-O-methylcytidine-3'-phosphate
  modified_base 5: mod_base = OTHER; note = 2'-O-methylguanosine-3'-phosphate
  modified_base 6: mod_base = OTHER; note = 2'-fluoroadenosine-3'-phosphate
  modified_base 7: mod_base = OTHER; note = 2'-O-methylguanosine-3'-phosphate
  modified_base 8: mod_base = OTHER; note = 2'-fluoroguanosine-3'-phosphate
  modified_base 9: mod_base = OTHER; note = 2'-fluoroadenosine-3'-phosphate
  modified_base 10: mod_base = OTHER; note = 2'-O-methylcytidine-3'-phosphate
  modified_base 11: mod_base = OTHER; note = 2'-O-methyladenosine-3'-phosphate
  modified_base 12: mod_base = OTHER; note = 2'-O-methyluridine-3'-phosphate
  modified_base 13: mod_base = OTHER; note = 2'-O-methylcytidine-3'-phosphate
  modified_base 14: mod_base = OTHER; note = 2'-fluorouridine-3'-phosphate
  modified_base 15: mod_base = OTHER; note = 2'-O-methyluridine-3'-phosphate
  modified_base 16: mod_base = OTHER; note = 2'-fluoroguanosine-3'-phosphate
  modified_base 17: mod_base = OTHER; note = 2'-O-methyladenosine-3'-phosphate
  modified_base 18: mod_base = OTHER; note = 2'-O-methyladenosine-3'-phosphate
  modified_base 19: mod_base = OTHER; note = 2'-O-methylcytidine-3'-phosphate
  modified_base 20: mod_base = OTHER; note = 2'-O-methyladenosine-3'-phosphate
  modified_base 21: mod_base = OTHER; note = 2'-O-methylcytidine-3'-phosphorothioate
  modified_base 22: mod_base = OTHER; note = 2'-O-methylcytidine-3'-phosphorothioate
  modified_base 23: mod_base = OTHER; note = 2'-O-methyluridine-3'-phosphate
tctcgaggacatcttgaacacct

SEQ ID NO: 2938 - RNA, 21 nt, synthetic construct
  source 1..21: mol_type = other RNA; note = Description of Artificial Sequence: Synthetic oligonucleotide
  modified_base 1: mod_base = OTHER; note = 2'-O-methyladenosine-3'-phosphorothioate
  modified_base 2: mod_base = OTHER; note = 2'-O-methylcytidine-3'-phosphorothioate
  modified_base 3: mod_base = OTHER; note = 2'-O-methyladenosine-3'-phosphate
  modified_base 4: mod_base = OTHER; note = 2'-O-methyluridine-3'-phosphate
  modified_base 5: mod_base = OTHER; note = 2'-O-methylguanosine-3'-phosphate
  modified_base 6: mod_base = OTHER; note = 2'-O-methylcytidine-3'-phosphate
  modified_base 7: mod_base = OTHER; note = 2'-fluorouridine-3'-phosphate
  modified_base 8: mod_base = OTHER; note = 2'-O-methyladenosine-3'-phosphate
  modified_base 9: mod_base = OTHER; note = 2'-fluoroadenosine-3'-phosphate
  modified_base 10: mod_base = OTHER; note = 2'-fluoroadenosine-3'-phosphate
  modified_base 11: mod_base = OTHER; note = 2'-fluorouridine-3'-phosphate
  modified_base 12: mod_base = OTHER; note = 2'-O-methylcytidine-3'-phosphate
  modified_base 13: mod_base = OTHER; note = 2'-O-methyladenosine-3'-phosphate
  modified_base 14: mod_base = OTHER; note = 2'-O-methylguanosine-3'-phosphate
  modified_base 15: mod_base = OTHER; note = 2'-O-methyluridine-3'-phosphate
  modified_base 16: mod_base = OTHER; note = 2'-O-methyladenosine-3'-phosphate
  modified_base 17: mod_base = OTHER; note = 2'-O-methylcytidine-3'-phosphate
  modified_base 18: mod_base = OTHER; note = 2'-O-methyluridine-3'-phosphate
  modified_base 19: mod_base = OTHER; note = 2'-O-methyluridine-3'-phosphate
  modified_base 20: mod_base = OTHER; note = 2'-O-methylcytidine-3'-phosphate
  modified_base 21: mod_base = OTHER; note = 2'-O-methylcytidine-3'-phosphate N-[tris(GalNAc-alkyl)-amidodecanoyl)]-4-hydroxyprolinol Hyp-(GalNAc-alkyl)3
acatgctaaatcagtacttcc

SEQ ID NO: 2939 - RNA, 23 nt, synthetic construct
  source 1..23: mol_type = other RNA; note = Description of Artificial Sequence: Synthetic oligonucleotide
  modified_base 1: mod_base = OTHER; note = 2'-O-methylguanosine-3'-phosphorothioate
  modified_base 2: mod_base = OTHER; note = 2'-fluoroguanosine-3'-phosphorothioate
  modified_base 3: mod_base = OTHER; note = 2'-O-methyladenosine-3'-phosphate
  modified_base 4: mod_base = OTHER; note = 2'-O-methyladenosine-3'-phosphate
  modified_base 5: mod_base = OTHER; note = 2'-O-methylguanosine-3'-phosphate
  modified_base 6: mod_base = OTHER; note = 2'-fluorouridine-3'-phosphate
  modified_base 7: mod_base = OTHER; note = 2'-O-methyladenosine-3'-phosphate
  modified_base 8: mod_base = OTHER; note = 2'-fluorocytidine-3'-phosphate
  modified_base 9: mod_base = OTHER; note = 2'-fluorouridine-3'-phosphate
  modified_base 10: mod_base = OTHER; note = 2'-O-methylguanosine-3'-phosphate
  modified_base 11: mod_base = OTHER; note = 2'-O-methyladenosine-3'-phosphate
  modified_base 12: mod_base = OTHER; note = 2'-O-methyluridine-3'-phosphate
  modified_base 13: mod_base = OTHER; note = 2'-O-methyluridine-3'-phosphate
  modified_base 14: mod_base = OTHER; note = 2'-fluorouridine-3'-phosphate
  modified_base 15: mod_base = OTHER; note = 2'-O-methyladenosine-3'-phosphate
  modified_base 16: mod_base = OTHER; note = 2'-fluoroguanosine-3'-phosphate
  modified_base 17: mod_base = OTHER; note = 2'-O-methylcytidine-3'-phosphate
  modified_base 18: mod_base = OTHER; note = 2'-O-methyladenosine-3'-phosphate
  modified_base 19: mod_base = OTHER; note = 2'-O-methyluridine-3'-phosphate
  modified_base 20: mod_base = OTHER; note = 2'-O-methylguanosine-3'-phosphate
  modified_base 21: mod_base = OTHER; note = 2'-O-methyluridine-3'-phosphorothioate
  modified_base 22: mod_base = OTHER; note = 2'-O-methyluridine-3'-phosphorothioate
  modified_base 23: mod_base = OTHER; note = 2'-O-methylguanosine-3'-phosphate
ggaagtactgatttagcatgttg

SEQ ID NO: 2940 - RNA, 21 nt, synthetic construct
  source 1..21: mol_type = other RNA; note = Description of Artificial Sequence: Synthetic oligonucleotide
  modified_base 1: mod_base = OTHER; note = 2'-O-methylcytidine-3'-phosphorothioate
  modified_base 2: mod_base = OTHER; note = 2'-O-methyladenosine-3'-phosphorothioate
  modified_base 3: mod_base = OTHER; note = 2'-O-methyluridine-3'-phosphate
  modified_base 4: mod_base = OTHER; note = 2'-O-methylguanosine-3'-phosphate
  modified_base 5: mod_base = OTHER; note = 2'-O-methylcytidine-3'-phosphate
  modified_base 6: mod_base = OTHER; note = 2'-O-methyluridine-3'-phosphate
  modified_base 7: mod_base = OTHER; note = 2'-fluoroadenosine-3'-phosphate
  modified_base 8: mod_base = OTHER; note = 2'-O-methyladenosine-3'-phosphate
  modified_base 9: mod_base = OTHER; note = 2'-fluoroadenosine-3'-phosphate
  modified_base 10: mod_base = OTHER; note = 2'-fluorouridine-3'-phosphate
  modified_base 11: mod_base = OTHER; note = 2'-fluorocytidine-3'-phosphate
  modified_base 12: mod_base = OTHER; note = 2'-O-methyladenosine-3'-phosphate
  modified_base 13: mod_base = OTHER; note = 2'-O-methylguanosine-3'-phosphate
  modified_base 14: mod_base = OTHER; note = 2'-O-methyluridine-3'-phosphate
  modified_base 15: mod_base = OTHER; note = 2'-O-methyladenosine-3'-phosphate
  modified_base 16: mod_base = OTHER; note = 2'-O-methylcytidine-3'-phosphate
  modified_base 17: mod_base = OTHER; note = 2'-O-methyluridine-3'-phosphate
  modified_base 18: mod_base = OTHER; note = 2'-O-methyluridine-3'-phosphate
  modified_base 19: mod_base = OTHER; note = 2'-O-methylcytidine-3'-phosphate
  modified_base 20: mod_base = OTHER; note = 2'-O-methylcytidine-3'-phosphate
  modified_base 21: mod_base = OTHER; note = 2'-O-methyladenosine-3'-phosphate N-[tris(GalNAc-alkyl)-amidodecanoyl)]-4-hydroxyprolinol Hyp-(GalNAc-alkyl)3
catgctaaatcagtacttcca

SEQ ID NO: 2941 - RNA, 23 nt, synthetic construct
  source 1..23: mol_type = other RNA; note = Description of Artificial Sequence: Synthetic oligonucleotide
  modified_base 1: mod_base = OTHER; note = 2'-O-methyluridine-3'-phosphorothioate
  modified_base 2: mod_base = OTHER; note = 2'-fluoroguanosine-3'-phosphorothioate
  modified_base 3: mod_base = OTHER; note = 2'-O-methylguanosine-3'-phosphate
  modified_base 4: mod_base = OTHER; note = 2'-O-methyladenosine-3'-phosphate
  modified_base 5: mod_base = OTHER; note = 2'-O-methyladenosine-3'-phosphate
  modified_base 6: mod_base = OTHER; note = 2'-fluoroguanosine-3'-phosphate
  modified_base 7: mod_base = OTHER; note = 2'-O-methyluridine-3'-phosphate
  modified_base 8: mod_base = OTHER; note = 2'-fluoroadenosine-3'-phosphate
  modified_base 9: mod_base = OTHER; note = 2'-fluorocytidine-3'-phosphate
  modified_base 10: mod_base = OTHER; note = 2'-O-methyluridine-3'-phosphate
  modified_base 11: mod_base = OTHER; note = 2'-O-methylguanosine-3'-phosphate
  modified_base 12: mod_base = OTHER; note = 2'-O-methyladenosine-3'-phosphate
  modified_base 13: mod_base = OTHER; note = 2'-O-methyluridine-3'-phosphate
  modified_base 14: mod_base = OTHER; note = 2'-fluorouridine-3'-phosphate
  modified_base 15: mod_base = OTHER; note = 2'-O-methyluridine-3'-phosphate
  modified_base 16: mod_base = OTHER; note = 2'-fluoroadenosine-3'-phosphate
  modified_base 17: mod_base = OTHER; note = 2'-O-methylguanosine-3'-phosphate
  modified_base 18: mod_base = OTHER; note = 2'-O-methylcytidine-3'-phosphate
  modified_base 19: mod_base = OTHER; note = 2'-O-methyladenosine-3'-phosphate
  modified_base 20: mod_base = OTHER; note = 2'-O-methyluridine-3'-phosphate
  modified_base 21: mod_base = OTHER; note = 2'-O-methylguanosine-3'-phosphorothioate
  modified_base 22: mod_base = OTHER; note = 2'-O-methyluridine-3'-phosphorothioate
  modified_base 23: mod_base = OTHER; note = 2'-O-methyluridine-3'-phosphate
tggaagtactgatttagcatgtt

SEQ ID NO: 2942 - RNA, 21 nt, synthetic construct
  source 1..21: mol_type = other RNA; note = Description of Artificial Sequence: Synthetic oligonucleotide
  modified_base 1: mod_base = OTHER; note = 2'-O-methyladenosine-3'-phosphorothioate
  modified_base 2: mod_base = OTHER; note = 2'-O-methyladenosine-3'-phosphorothioate
  modified_base 3: mod_base = OTHER; note = 2'-O-methylcytidine-3'-phosphate
  modified_base 4: mod_base = OTHER; note = 2'-O-methyladenosine-3'-phosphate
  modified_base 5: mod_base = OTHER; note = 2'-O-methyladenosine-3'-phosphate
  modified_base 6: mod_base = OTHER; note = 2'-O-methylcytidine-3'-phosphate
  modified_base 7: mod_base = OTHER; note = 2'-fluoroadenosine-3'-phosphate
  modified_base 8: mod_base = OTHER; note = 2'-O-methyluridine-3'-phosphate
  modified_base 9: mod_base = OTHER; note = 2'-fluoroguanosine-3'-phosphate
  modified_base 10: mod_base = OTHER; note = 2'-fluorocytidine-3'-phosphate
  modified_base 11: mod_base = OTHER; note = 2'-fluorouridine-3'-phosphate
  modified_base 12: mod_base = OTHER; note = 2'-O-methyladenosine-3'-phosphate
  modified_base 13: mod_base = OTHER; note = 2'-O-methyladenosine-3'-phosphate
  modified_base 14: mod_base = OTHER; note = 2'-O-methyladenosine-3'-phosphate
  modified_base 15: mod_base = OTHER; note = 2'-O-methyluridine-3'-phosphate
  modified_base 16: mod_base = OTHER; note = 2'-O-methylcytidine-3'-phosphate
  modified_base 17: mod_base = OTHER; note = 2'-O-methyladenosine-3'-phosphate
  modified_base 18: mod_base = OTHER; note = 2'-O-methylguanosine-3'-phosphate
  modified_base 19: mod_base = OTHER; note = 2'-O-methyluridine-3'-phosphate
  modified_base 20: mod_base = OTHER; note = 2'-O-methyladenosine-3'-phosphate
  modified_base 21: mod_base = OTHER; note = 2'-O-methylcytidine-3'-phosphate N-[tris(GalNAc-alkyl)-amidodecanoyl)]-4-hydroxyprolinol Hyp-(GalNAc-alkyl)3
aacaacatgctaaatcagtac

SEQ ID NO: 2943 - RNA, 23 nt, synthetic construct
  source 1..23: mol_type = other RNA; note = Description of Artificial Sequence: Synthetic oligonucleotide
  modified_base 1: mod_base = OTHER; note = 2'-O-methylguanosine-3'-phosphorothioate
  modified_base 2: mod_base = OTHER; note = 2'-fluorouridine -3'-phosphorothioate
  modified_base 3: mod_base = OTHER; note = 2'-O-methyladenosine-3'-phosphate
  modified_base 4: mod_base = OTHER; note = 2'-O-methylcytidine-3'-phosphate
  modified_base 5: mod_base = OTHER; note = 2'-O-methyluridine-3'-phosphate
  modified_base 6: mod_base = OTHER; note = 2'-fluoroguanosine-3'-phosphate
  modified_base 7: mod_base = OTHER; note = 2'-O-methyladenosine-3'-phosphate
  modified_base 8: mod_base = OTHER; note = 2'-fluorouridine-3'-phosphate
  modified_base 9: mod_base = OTHER; note = 2'-fluorouridine-3'-phosphate
  modified_base 10: mod_base = OTHER; note = 2'-O-methyluridine-3'-phosphate
  modified_base 11: mod_base = OTHER; note = 2'-O-methyladenosine-3'-phosphate
  modified_base 12: mod_base = OTHER; note = 2'-O-methylguanosine-3'-phosphate
  modified_base 13: mod_base = OTHER; note = 2'-O-methylcytidine-3'-phosphate
  modified_base 14: mod_base = OTHER; note = 2'-fluoroadenosine-3'-phosphate
  modified_base 15: mod_base = OTHER; note = 2'-O-methyluridine-3'-phosphate
  modified_base 16: mod_base = OTHER; note = 2'-fluoroguanosine-3'-phosphate
  modified_base 17: mod_base = OTHER; note = 2'-O-methyluridine-3'-phosphate
  modified_base 18: mod_base = OTHER; note = 2'-O-methyluridine-3'-phosphate
  modified_base 19: mod_base = OTHER; note = 2'-O-methylguanosine-3'-phosphate
  modified_base 20: mod_base = OTHER; note = 2'-O-methyluridine-3'-phosphate
  modified_base 21: mod_base = OTHER; note = 2'-O-methyluridine-3'-phosphorothioate
  modified_base 22: mod_base = OTHER; note = 2'-O-methylcytidine-3'-phosphorothioate
  modified_base 23: mod_base = OTHER; note = 2'-O-methyladenosine-3'-phosphate
gtactgatttagcatgttgttca

SEQ ID NO: 2944 - RNA, 21 nt, synthetic construct
  source 1..21: mol_type = other RNA; note = Description of Artificial Sequence: Synthetic oligonucleotide
  modified_base 1: mod_base = OTHER; note = 2'-O-methylguanosine-3'-phosphorothioate
  modified_base 2: mod_base = OTHER; note = 2'-O-methyladenosine-3'-phosphorothioate
  modified_base 3: mod_base = OTHER; note = 2'-O-methyladenosine-3'-phosphate
  modified_base 4: mod_base = OTHER; note = 2'-O-methylcytidine-3'-phosphate
  modified_base 5: mod_base = OTHER; note = 2'-O-methyladenosine-3'-phosphate
  modified_base 6: mod_base = OTHER; note = 2'-O-methyladenosine-3'-phosphate
  modified_base 7: mod_base = OTHER; note = 2'-fluorocytidine-3'-phosphate
  modified_base 8: mod_base = OTHER; note = 2'-O-methyladenosine-3'-phosphate
  modified_base 9: mod_base = OTHER; note = 2'-fluorouridine-3'-phosphate
  modified_base 10: mod_base = OTHER; note = 2'-fluoroguanosine-3'-phosphate
  modified_base 11: mod_base = OTHER; note = 2'-fluorocytidine-3'-phosphate
  modified_base 12: mod_base = OTHER; note = 2'-O-methyluridine-3'-phosphate
  modified_base 13: mod_base = OTHER; note = 2'-O-methyladenosine-3'-phosphate
  modified_base 14: mod_base = OTHER; note = 2'-O-methyladenosine-3'-phosphate
  modified_base 15: mod_base = OTHER; note = 2'-O-methyladenosine-3'-phosphate
  modified_base 16: mod_base = OTHER; note = 2'-O-methyluridine-3'-phosphate
  modified_base 17: mod_base = OTHER; note = 2'-O-methylcytidine-3'-phosphate
  modified_base 18: mod_base = OTHER; note = 2'-O-methyladenosine-3'-phosphate
  modified_base 19: mod_base = OTHER; note = 2'-O-methylguanosine-3'-phosphate
  modified_base 20: mod_base = OTHER; note = 2'-O-methyluridine-3'-phosphate
  modified_base 21: mod_base = OTHER; note = 2'-O-methyladenosine-3'-phosphate N-[tris(GalNAc-alkyl)-amidodecanoyl)]-4-hydroxyprolinol Hyp-(GalNAc-alkyl)3
gaacaacatgctaaatcagta

SEQ ID NO: 2945 - RNA, 23 nt, synthetic construct
  source 1..23: mol_type = other RNA; note = Description of Artificial Sequence: Synthetic oligonucleotide
  modified_base 1: mod_base = OTHER; note = 2'-O-methyluridine-3'-phosphorothioate
  modified_base 2: mod_base = OTHER; note = 2'-fluoroadenosine-3'-phosphorothioate
  modified_base 3: mod_base = OTHER; note = 2'-O-methylcytidine-3'-phosphate
  modified_base 4: mod_base = OTHER; note = 2'-O-methyluridine-3'-phosphate
  modified_base 5: mod_base = OTHER; note = 2'-O-methylguanosine-3'-phosphate
  modified_base 6: mod_base = OTHER; note = 2'-fluoroadenosine-3'-phosphate
  modified_base 7: mod_base = OTHER; note = 2'-O-methyluridine-3'-phosphate
  modified_base 8: mod_base = OTHER; note = 2'-fluorouridine-3'-phosphate
  modified_base 9: mod_base = OTHER; note = 2'-fluorouridine-3'-phosphate
  modified_base 10: mod_base = OTHER; note = 2'-O-methyladenosine-3'-phosphate
  modified_base 11: mod_base = OTHER; note = 2'-O-methylguanosine-3'-phosphate
  modified_base 12: mod_base = OTHER; note = 2'-O-methylcytidine-3'-phosphate
  modified_base 13: mod_base = OTHER; note = 2'-O-methyladenosine-3'-phosphate
  modified_base 14: mod_base = OTHER; note = 2'-fluorouridine-3'-phosphate
  modified_base 15: mod_base = OTHER; note = 2'-O-methylguanosine-3'-phosphate
  modified_base 16: mod_base = OTHER; note = 2'-fluorouridine-3'-phosphate
  modified_base 17: mod_base = OTHER; note = 2'-O-methyluridine-3'-phosphate
  modified_base 18: mod_base = OTHER; note = 2'-O-methylguanosine-3'-phosphate
  modified_base 19: mod_base = OTHER; note = 2'-O-methyluridine-3'-phosphate
  modified_base 20: mod_base = OTHER; note = 2'-O-methyluridine-3'-phosphate
  modified_base 21: mod_base = OTHER; note = 2'-O-methylcytidine-3'-phosphorothioate
  modified_base 22: mod_base = OTHER; note = 2'-O-methyladenosine-3'-phosphorothioate
  modified_base 23: mod_base = OTHER; note = 2'-O-methyluridine-3'-phosphate
tactgatttagcatgttgttcat

SEQ ID NO: 2946 - RNA, 21 nt, synthetic construct
  source 1..21: mol_type = other RNA; note = Description of Artificial Sequence: Synthetic oligonucleotide
  modified_base 1: mod_base = OTHER; note = 2'-O-methylguanosine-3'-phosphorothioate
  modified_base 2: mod_base = OTHER; note = 2'-O-methyladenosine-3'-phosphorothioate
  modified_base 3: mod_base = OTHER; note = 2'-O-methyladenosine-3'-phosphate
  modified_base 4: mod_base = OTHER; note = 2'-O-methyladenosine-3'-phosphate
  modified_base 5: mod_base = OTHER; note = 2'-O-methylguanosine-3'-phosphate
  modified_base 6: mod_base = OTHER; note = 2'-O-methylguanosine-3'-phosphate
  modified_base 7: mod_base = OTHER; note = 2'-fluorocytidine-3'-phosphate
  modified_base 8: mod_base = OTHER; note = 2'-O-methyladenosine-3'-phosphate
  modified_base 9: mod_base = OTHER; note = 2'-fluorocytidine-3'-phosphate
  modified_base 10: mod_base = OTHER; note = 2'-fluorouridine-3'-phosphate
  modified_base 11: mod_base = OTHER; note = 2'-fluoroguanosine-3'-phosphate
  modified_base 12: mod_base = OTHER; note = 2'-O-methyladenosine-3'-phosphate
  modified_base 13: mod_base = OTHER; note = 2'-O-methyluridine-3'-phosphate
  modified_base 14: mod_base = OTHER; note = 2'-O-methylguanosine-3'-phosphate
  modified_base 15: mod_base = OTHER; note = 2'-O-methyluridine-3'-phosphate
  modified_base 16: mod_base = OTHER; note = 2'-O-methyluridine-3'-phosphate
  modified_base 17: mod_base = OTHER; note = 2'-O-methylcytidine-3'-phosphate
  modified_base 18: mod_base = OTHER; note = 2'-O-methyluridine-3'-phosphate
  modified_base 19: mod_base = OTHER; note = 2'-O-methylguanosine-3'-phosphate
  modified_base 20: mod_base = OTHER; note = 2'-O-methyladenosine-3'-phosphate
  modified_base 21: mod_base = OTHER; note = 2'-O-methyladenosine-3'-phosphate N-[tris(GalNAc-alkyl)-amidodecanoyl)]-4-hydroxyprolinol Hyp-(GalNAc-alkyl)3
gaaaggcactgatgttctgaa

SEQ ID NO: 2947 - RNA, 23 nt, synthetic construct
  source 1..23: mol_type = other RNA; note = Description of Artificial Sequence: Synthetic oligonucleotide
  modified_base 1: mod_base = OTHER; note = 2'-O-methyluridine-3'-phosphorothioate
  modified_base 2: mod_base = OTHER; note = 2'-fluorouridine -3'-phosphorothioate
  modified_base 3: mod_base = OTHER; note = 2'-O-methylcytidine-3'-phosphate
  modified_base 4: mod_base = OTHER; note = 2'-O-methyladenosine-3'-phosphate
  modified_base 5: mod_base = OTHER; note = 2'-O-methylguanosine-3'-phosphate
  modified_base 6: mod_base = OTHER; note = 2'-fluoroadenosine-3'-phosphate
  modified_base 7: mod_base = OTHER; note = 2'-O-methyladenosine-3'-phosphate
  modified_base 8: mod_base = OTHER; note = 2'-fluorocytidine-3'-phosphate
  modified_base 9: mod_base = OTHER; note = 2'-fluoroadenosine-3'-phosphate
  modified_base 10: mod_base = OTHER; note = 2'-O-methyluridine-3'-phosphate
  modified_base 11: mod_base = OTHER; note = 2'-O-methylcytidine-3'-phosphate
  modified_base 12: mod_base = OTHER; note = 2'-O-methyladenosine-3'-phosphate
  modified_base 13: mod_base = OTHER; note = 2'-O-methylguanosine-3'-phosphate
  modified_base 14: mod_base = OTHER; note = 2'-fluorouridine-3'-phosphate
  modified_base 15: mod_base = OTHER; note = 2'-O-methylguanosine-3'-phosphate
  modified_base 16: mod_base = OTHER; note = 2'-fluorocytidine-3'-phosphate
  modified_base 17: mod_base = OTHER; note = 2'-O-methylcytidine-3'-phosphate
  modified_base 18: mod_base = OTHER; note = 2'-O-methyluridine-3'-phosphate
  modified_base 19: mod_base = OTHER; note = 2'-O-methyluridine-3'-phosphate
  modified_base 20: mod_base = OTHER; note = 2'-O-methyluridine-3'-phosphate
  modified_base 21: mod_base = OTHER; note = 2'-O-methylcytidine-3'-phosphorothioate
  modified_base 22: mod_base = OTHER; note = 2'-O-methylcytidine-3'-phosphorothioate
  modified_base 23: mod_base = OTHER; note = 2'-O-methylguanosine-3'-phosphate
ttcagaacatcagtgcctttccg

SEQ ID NO: 2948 - RNA, 21 nt, synthetic construct
  source 1..21: mol_type = other RNA; note = Description of Artificial Sequence: Synthetic oligonucleotide
  modified_base 1: mod_base = OTHER; note = 2'-O-methyladenosine-3'-phosphorothioate
  modified_base 2: mod_base = OTHER; note = 2'-O-methyladenosine-3'-phosphorothioate
  modified_base 3: mod_base = OTHER; note = 2'-O-methyladenosine-3'-phosphate
  modified_base 4: mod_base = OTHER; note = 2'-O-methylguanosine-3'-phosphate
  modified_base 5: mod_base = OTHER; note = 2'-O-methylguanosine-3'-phosphate
  modified_base 6: mod_base = OTHER; note = 2'-O-methylcytidine-3'-phosphate
  modified_base 7: mod_base = OTHER; note = 2'-fluoroadenosine-3'-phosphate
  modified_base 8: mod_base = OTHER; note = 2'-O-methylcytidine-3'-phosphate
  modified_base 9: mod_base = OTHER; note = 2'-fluorouridine-3'-phosphate
  modified_base 10: mod_base = OTHER; note = 2'-fluoroguanosine-3'-phosphate
  modified_base 11: mod_base = OTHER; note = 2'-fluoroadenosine-3'-phosphate
  modified_base 12: mod_base = OTHER; note = 2'-O-methyluridine-3'-phosphate
  modified_base 13: mod_base = OTHER; note = 2'-O-methylguanosine-3'-phosphate
  modified_base 14: mod_base = OTHER; note = 2'-O-methyluridine-3'-phosphate
  modified_base 15: mod_base = OTHER; note = 2'-O-methyluridine-3'-phosphate
  modified_base 16: mod_base = OTHER; note = 2'-O-methylcytidine-3'-phosphate
  modified_base 17: mod_base = OTHER; note = 2'-O-methyluridine-3'-phosphate
  modified_base 18: mod_base = OTHER; note = 2'-O-methylguanosine-3'-phosphate
  modified_base 19: mod_base = OTHER; note = 2'-O-methyladenosine-3'-phosphate
  modified_base 20: mod_base = OTHER; note = 2'-O-methyladenosine-3'-phosphate
  modified_base 21: mod_base = OTHER; note = 2'-O-methyladenosine-3'-phosphate N-[tris(GalNAc-alkyl)-amidodecanoyl)]-4-hydroxyprolinol Hyp-(GalNAc-alkyl)3
aaaggcactgatgttctgaaa

SEQ ID NO: 2949 - RNA, 23 nt, synthetic construct
  source 1..23: mol_type = other RNA; note = Description of Artificial Sequence: Synthetic oligonucleotide
  modified_base 1: mod_base = OTHER; note = 2'-O-methyluridine-3'-phosphorothioate
  modified_base 2: mod_base = OTHER; note = 2'-fluorouridine -3'-phosphorothioate
  modified_base 3: mod_base = OTHER; note = 2'-O-methyluridine-3'-phosphate
  modified_base 4: mod_base = OTHER; note = 2'-O-methylcytidine-3'-phosphate
  modified_base 5: mod_base = OTHER; note = 2'-O-methyladenosine-3'-phosphate
  modified_base 6: mod_base = OTHER; note = 2'-fluoroguanosine-3'-phosphate
  modified_base 7: mod_base = OTHER; note = 2'-O-methyladenosine-3'-phosphate
  modified_base 8: mod_base = OTHER; note = 2'-fluoroadenosine-3'-phosphate
  modified_base 9: mod_base = OTHER; note = 2'-fluorocytidine-3'-phosphate
  modified_base 10: mod_base = OTHER; note = 2'-O-methyladenosine-3'-phosphate
  modified_base 11: mod_base = OTHER; note = 2'-O-methyluridine-3'-phosphate
  modified_base 12: mod_base = OTHER; note = 2'-O-methylcytidine-3'-phosphate
  modified_base 13: mod_base = OTHER; note = 2'-O-methyladenosine-3'-phosphate
  modified_base 14: mod_base = OTHER; note = 2'-fluoroguanosine-3'-phosphate
  modified_base 15: mod_base = OTHER; note = 2'-O-methyluridine-3'-phosphate
  modified_base 16: mod_base = OTHER; note = 2'-fluoroguanosine-3'-phosphate
  modified_base 17: mod_base = OTHER; note = 2'-O-methylcytidine-3'-phosphate
  modified_base 18: mod_base = OTHER; note = 2'-O-methylcytidine-3'-phosphate
  modified_base 19: mod_base = OTHER; note = 2'-O-methyluridine-3'-phosphate
  modified_base 20: mod_base = OTHER; note = 2'-O-methyluridine-3'-phosphate
  modified_base 21: mod_base = OTHER; note = 2'-O-methyluridine-3'-phosphorothioate
  modified_base 22: mod_base = OTHER; note = 2'-O-methylcytidine-3'-phosphorothioate
  modified_base 23: mod_base = OTHER; note = 2'-O-methylcytidine-3'-phosphate
tttcagaacatcagtgcctttcc

SEQ ID NO: 2950 - RNA, 21 nt, synthetic construct
  source 1..21: mol_type = other RNA; note = Description of Artificial Sequence: Synthetic oligonucleotide
  modified_base 1: mod_base = OTHER; note = 2'-O-methyluridine-3'-phosphorothioate
  modified_base 2: mod_base = OTHER; note = 2'-O-methylguanosine-3'-phosphorothioate
  modified_base 3: mod_base = OTHER; note = 2'-O-methylcytidine-3'-phosphate
  modified_base 4: mod_base = OTHER; note = 2'-O-methylguanosine-3'-phosphate
  modified_base 5: mod_base = OTHER; note = 2'-O-methylguanosine-3'-phosphate
  modified_base 6: mod_base = OTHER; note = 2'-O-methyladenosine-3'-phosphate
  modified_base 7: mod_base = OTHER; note = 2'-fluoroadenosine-3'-phosphate
  modified_base 8: mod_base = OTHER; note = 2'-O-methyladenosine-3'-phosphate
  modified_base 9: mod_base = OTHER; note = 2'-fluoroguanosine-3'-phosphate
  modified_base 10: mod_base = OTHER; note = 2'-fluoroguanosine-3'-phosphate
  modified_base 11: mod_base = OTHER; note = 2'-fluorocytidine-3'-phosphate
  modified_base 12: mod_base = OTHER; note = 2'-O-methyladenosine-3'-phosphate
  modified_base 13: mod_base = OTHER; note = 2'-O-methylcytidine-3'-phosphate
  modified_base 14: mod_base = OTHER; note = 2'-O-methyluridine-3'-phosphate
  modified_base 15: mod_base = OTHER; note = 2'-O-methylguanosine-3'-phosphate
  modified_base 16: mod_base = OTHER; note = 2'-O-methyladenosine-3'-phosphate
  modified_base 17: mod_base = OTHER; note = 2'-O-methyluridine-3'-phosphate
  modified_base 18: mod_base = OTHER; note = 2'-O-methylguanosine-3'-phosphate
  modified_base 19: mod_base = OTHER; note = 2'-O-methyluridine-3'-phosphate
  modified_base 20: mod_base = OTHER; note = 2'-O-methyluridine-3'-phosphate
  modified_base 21: mod_base = OTHER; note = 2'-O-methylcytidine-3'-phosphate N-[tris(GalNAc-alkyl)-amidodecanoyl)]-4-hydroxyprolinol Hyp-(GalNAc-alkyl)3
tgcggaaaggcactgatgttc

SEQ ID NO: 2951 - RNA, 23 nt, synthetic construct
  source 1..23: mol_type = other RNA; note = Description of Artificial Sequence: Synthetic oligonucleotide
  modified_base 1: mod_base = OTHER; note = 2'-O-methylguanosine-3'-phosphorothioate
  modified_base 2: mod_base = OTHER; note = 2'-fluoroadenosine-3'-phosphorothioate
  modified_base 3: mod_base = OTHER; note = 2'-O-methyladenosine-3'-phosphate
  modified_base 4: mod_base = OTHER; note = 2'-O-methylcytidine-3'-phosphate
  modified_base 5: mod_base = OTHER; note = 2'-O-methyladenosine-3'-phosphate
  modified_base 6: mod_base = OTHER; note = 2'-fluorouridine-3'-phosphate
  modified_base 7: mod_base = OTHER; note = 2'-O-methylcytidine-3'-phosphate
  modified_base 8: mod_base = OTHER; note = 2'-fluoroadenosine-3'-phosphate
  modified_base 9: mod_base = OTHER; note = 2'-fluoroguanosine-3'-phosphate
  modified_base 10: mod_base = OTHER; note = 2'-O-methyluridine-3'-phosphate
  modified_base 11: mod_base = OTHER; note = 2'-O-methylguanosine-3'-phosphate
  modified_base 12: mod_base = OTHER; note = 2'-O-methylcytidine-3'-phosphate
  modified_base 13: mod_base = OTHER; note = 2'-O-methylcytidine-3'-phosphate
  modified_base 14: mod_base = OTHER; note = 2'-fluorouridine-3'-phosphate
  modified_base 15: mod_base = OTHER; note = 2'-O-methyluridine-3'-phosphate
  modified_base 16: mod_base = OTHER; note = 2'-fluorouridine-3'-phosphate
  modified_base 17: mod_base = OTHER; note = 2'-O-methylcytidine-3'-phosphate
  modified_base 18: mod_base = OTHER; note = 2'-O-methylcytidine-3'-phosphate
  modified_base 19: mod_base = OTHER; note = 2'-O-methylguanosine-3'-phosphate
  modified_base 20: mod_base = OTHER; note = 2'-O-methylcytidine-3'-phosphate
  modified_base 21: mod_base = OTHER; note = 2'-O-methyladenosine-3'-phosphorothioate
  modified_base 22: mod_base = OTHER; note = 2'-O-methylcytidine-3'-phosphorothioate
  modified_base 23: mod_base = OTHER; note = 2'-O-methyladenosine-3'-phosphate
gaacatcagtgcctttccgcaca

SEQ ID NO: 2952 - RNA, 21 nt, synthetic construct
  source 1..21: mol_type = other RNA; note = Description of Artificial Sequence: Synthetic oligonucleotide
  modified_base 1: mod_base = OTHER; note = 2'-O-methylguanosine-3'-phosphorothioate
  modified_base 2: mod_base = OTHER; note = 2'-O-methyluridine-3'-phosphorothioate
  modified_base 3: mod_base = OTHER; note = 2'-O-methylguanosine-3'-phosphate
  modified_base 4: mod_base = OTHER; note = 2'-O-methylcytidine-3'-phosphate
  modified_base 5: mod_base = OTHER; note = 2'-O-methylguanosine-3'-phosphate
  modified_base 6: mod_base = OTHER; note = 2'-O-methylguanosine-3'-phosphate
  modified_base 7: mod_base = OTHER; note = 2'-fluoroadenosine-3'-phosphate
  modified_base 8: mod_base = OTHER; note = 2'-O-methyladenosine-3'-phosphate
  modified_base 9: mod_base = OTHER; note = 2'-fluoroadenosine-3'-phosphate
  modified_base 10: mod_base = OTHER; note = 2'-fluoroguanosine-3'-phosphate
  modified_base 11: mod_base = OTHER; note = 2'-fluoroguanosine-3'-phosphate
  modified_base 12: mod_base = OTHER; note = 2'-O-methylcytidine-3'-phosphate
  modified_base 13: mod_base = OTHER; note = 2'-O-methyladenosine-3'-phosphate
  modified_base 14: mod_base = OTHER; note = 2'-O-methylcytidine-3'-phosphate
  modified_base 15: mod_base = OTHER; note = 2'-O-methyluridine-3'-phosphate
  modified_base 16: mod_base = OTHER; note = 2'-O-methylguanosine-3'-phosphate
  modified_base 17: mod_base = OTHER; note = 2'-O-methyladenosine-3'-phosphate
  modified_base 18: mod_base = OTHER; note = 2'-O-methyluridine-3'-phosphate
  modified_base 19: mod_base = OTHER; note = 2'-O-methylguanosine-3'-phosphate
  modified_base 20: mod_base = OTHER; note = 2'-O-methyluridine-3'-phosphate
  modified_base 21: mod_base = OTHER; note = 2'-O-methyluridine-3'-phosphate N-[tris(GalNAc-alkyl)-amidodecanoyl)]-4-hydroxyprolinol Hyp-(GalNAc-alkyl)3
gtgcggaaaggcactgatgtt

SEQ ID NO: 2953 - RNA, 23 nt, synthetic construct
  source 1..23: mol_type = other RNA; note = Description of Artificial Sequence: Synthetic oligonucleotide
  modified_base 1: mod_base = OTHER; note = 2'-O-methyladenosine-3'-phosphorothioate
  modified_base 2: mod_base = OTHER; note = 2'-fluoroadenosine-3'-phosphorothioate
  modified_base 3: mod_base = OTHER; note = 2'-O-methylcytidine-3'-phosphate
  modified_base 4: mod_base = OTHER; note = 2'-O-methyladenosine-3'-phosphate
  modified_base 5: mod_base = OTHER; note = 2'-O-methyluridine-3'-phosphate
  modified_base 6: mod_base = OTHER; note = 2'-fluorocytidine-3'-phosphate
  modified_base 7: mod_base = OTHER; note = 2'-O-methyladenosine-3'-phosphate
  modified_base 8: mod_base = OTHER; note = 2'-fluoroguanosine-3'-phosphate
  modified_base 9: mod_base = OTHER; note = 2'-fluorouridine-3'-phosphate
  modified_base 10: mod_base = OTHER; note = 2'-O-methylguanosine-3'-phosphate
  modified_base 11: mod_base = OTHER; note = 2'-O-methylcytidine-3'-phosphate
  modified_base 12: mod_base = OTHER; note = 2'-O-methylcytidine-3'-phosphate
  modified_base 13: mod_base = OTHER; note = 2'-O-methyluridine-3'-phosphate
  modified_base 14: mod_base = OTHER; note = 2'-fluorouridine-3'-phosphate
  modified_base 15: mod_base = OTHER; note = 2'-O-methyluridine-3'-phosphate
  modified_base 16: mod_base = OTHER; note = 2'-fluorocytidine-3'-phosphate
  modified_base 17: mod_base = OTHER; note = 2'-O-methylcytidine-3'-phosphate
  modified_base 18: mod_base = OTHER; note = 2'-O-methylguanosine-3'-phosphate
  modified_base 19: mod_base = OTHER; note = 2'-O-methylcytidine-3'-phosphate
  modified_base 20: mod_base = OTHER; note = 2'-O-methyladenosine-3'-phosphate
  modified_base 21: mod_base = OTHER; note = 2'-O-methylcytidine-3'-phosphorothioate
  modified_base 22: mod_base = OTHER; note = 2'-O-methyladenosine-3'-phosphorothioate
  modified_base 23: mod_base = OTHER; note = 2'-O-methylcytidine-3'-phosphate
aacatcagtgcctttccgcacac

SEQ ID NO: 2954 - RNA, 21 nt, synthetic construct
  source 1..21: mol_type = other RNA; note = Description of Artificial Sequence: Synthetic oligonucleotide
  modified_base 1: mod_base = OTHER; note = 2'-O-methylguanosine-3'-phosphorothioate
  modified_base 2: mod_base = OTHER; note = 2'-O-methyluridine-3'-phosphorothioate
  modified_base 3: mod_base = OTHER; note = 2'-O-methylcytidine-3'-phosphate
  modified_base 4: mod_base = OTHER; note = 2'-O-methyladenosine-3'-phosphate
  modified_base 5: mod_base = OTHER; note = 2'-O-methylguanosine-3'-phosphate
  modified_base 6: mod_base = OTHER; note = 2'-O-methylcytidine-3'-phosphate
  modified_base 7: mod_base = OTHER; note = 2'-fluoroadenosine-3'-phosphate
  modified_base 8: mod_base = OTHER; note = 2'-O-methyluridine-3'-phosphate
  modified_base 9: mod_base = OTHER; note = 2'-fluoroguanosine-3'-phosphate
  modified_base 10: mod_base = OTHER; note = 2'-fluorocytidine-3'-phosphate
  modified_base 11: mod_base = OTHER; note = 2'-fluorocytidine-3'-phosphate
  modified_base 12: mod_base = OTHER; note = 2'-O-methyladenosine-3'-phosphate
  modified_base 13: mod_base = OTHER; note = 2'-O-methyladenosine-3'-phosphate
  modified_base 14: mod_base = OTHER; note = 2'-O-methyluridine-3'-phosphate
  modified_base 15: mod_base = OTHER; note = 2'-O-methyladenosine-3'-phosphate
  modified_base 16: mod_base = OTHER; note = 2'-O-methyluridine-3'-phosphate
  modified_base 17: mod_base = OTHER; note = 2'-O-methylguanosine-3'-phosphate
  modified_base 18: mod_base = OTHER; note = 2'-O-methyluridine-3'-phosphate
  modified_base 19: mod_base = OTHER; note = 2'-O-methylguanosine-3'-phosphate
  modified_base 20: mod_base = OTHER; note = 2'-O-methyluridine-3'-phosphate
  modified_base 21: mod_base = OTHER; note = 2'-O-methylguanosine-3'-phosphate N-[tris(GalNAc-alkyl)-amidodecanoyl)]-4-hydroxyprolinol Hyp-(GalNAc-alkyl)3
gtcagcatgccaatatgtgtg

SEQ ID NO: 2955 - RNA, 23 nt, synthetic construct
  source 1..23: mol_type = other RNA; note = Description of Artificial Sequence: Synthetic oligonucleotide
  modified_base 1: mod_base = OTHER; note = 2'-O-methylcytidine-3'-phosphorothioate
  modified_base 2: mod_base = OTHER; note = 2'-fluoroadenosine-3'-phosphorothioate
  modified_base 3: mod_base = OTHER; note = 2'-O-methylcytidine-3'-phosphate
  modified_base 4: mod_base = OTHER; note = 2'-O-methyladenosine-3'-phosphate
  modified_base 5: mod_base = OTHER; note = 2'-O-methylcytidine-3'-phosphate
  modified_base 6: mod_base = OTHER; note = 2'-fluoroadenosine-3'-phosphate
  modified_base 7: mod_base = OTHER; note = 2'-O-methyluridine-3'-phosphate
  modified_base 8: mod_base = OTHER; note = 2'-fluoroadenosine-3'-phosphate
  modified_base 9: mod_base = OTHER; note = 2'-fluorouridine-3'-phosphate
  modified_base 10: mod_base = OTHER; note = 2'-O-methyluridine-3'-phosphate
  modified_base 11: mod_base = OTHER; note = 2'-O-methylguanosine-3'-phosphate
  modified_base 12: mod_base = OTHER; note = 2'-O-methylguanosine-3'-phosphate
  modified_base 13: mod_base = OTHER; note = 2'-O-methylcytidine-3'-phosphate
  modified_base 14: mod_base = OTHER; note = 2'-fluoroadenosine-3'-phosphate
  modified_base 15: mod_base = OTHER; note = 2'-O-methyluridine-3'-phosphate
  modified_base 16: mod_base = OTHER; note = 2'-fluoroguanosine-3'-phosphate
  modified_base 17: mod_base = OTHER; note = 2'-O-methylcytidine-3'-phosphate
  modified_base 18: mod_base = OTHER; note = 2'-O-methyluridine-3'-phosphate
  modified_base 19: mod_base = OTHER; note = 2'-O-methylguanosine-3'-phosphate
  modified_base 20: mod_base = OTHER; note = 2'-O-methyladenosine-3'-phosphate
  modified_base 21: mod_base = OTHER; note = 2'-O-methylcytidine-3'-phosphorothioate
  modified_base 22: mod_base = OTHER; note = 2'-O-methylcytidine-3'-phosphorothioate
  modified_base 23: mod_base = OTHER; note = 2'-O-methylcytidine-3'-phosphate
cacacatattggcatgctgaccc

SEQ ID NO: 2956 - RNA, 21 nt, synthetic construct
  source 1..21: mol_type = other RNA; note = Description of Artificial Sequence: Synthetic oligonucleotide
  modified_base 1: mod_base = OTHER; note = 2'-O-methyluridine-3'-phosphorothioate
  modified_base 2: mod_base = OTHER; note = 2'-O-methylcytidine-3'-phosphorothioate
  modified_base 3: mod_base = OTHER; note = 2'-O-methyladenosine-3'-phosphate
  modified_base 4: mod_base = OTHER; note = 2'-O-methylguanosine-3'-phosphate
  modified_base 5: mod_base = OTHER; note = 2'-O-methylcytidine-3'-phosphate
  modified_base 6: mod_base = OTHER; note = 2'-O-methyladenosine-3'-phosphate
  modified_base 7: mod_base = OTHER; note = 2'-fluorouridine-3'-phosphate
  modified_base 8: mod_base = OTHER; note = 2'-O-methylguanosine-3'-phosphate
  modified_base 9: mod_base = OTHER; note = 2'-fluorocytidine-3'-phosphate
  modified_base 10: mod_base = OTHER; note = 2'-fluorocytidine-3'-phosphate
  modified_base 11: mod_base = OTHER; note = 2'-fluoroadenosine-3'-phosphate
  modified_base 12: mod_base = OTHER; note = 2'-O-methyladenosine-3'-phosphate
  modified_base 13: mod_base = OTHER; note = 2'-O-methyluridine-3'-phosphate
  modified_base 14: mod_base = OTHER; note = 2'-O-methyladenosine-3'-phosphate
  modified_base 15: mod_base = OTHER; note = 2'-O-methyluridine-3'-phosphate
  modified_base 16: mod_base = OTHER; note = 2'-O-methylguanosine-3'-phosphate
  modified_base 17: mod_base = OTHER; note = 2'-O-methyluridine-3'-phosphate
  modified_base 18: mod_base = OTHER; note = 2'-O-methylguanosine-3'-phosphate
  modified_base 19: mod_base = OTHER; note = 2'-O-methyluridine-3'-phosphate
  modified_base 20: mod_base = OTHER; note = 2'-O-methylguanosine-3'-phosphate
  modified_base 21: mod_base = OTHER; note = 2'-O-methylguanosine-3'-phosphate N-[tris(GalNAc-alkyl)-amidodecanoyl)]-4-hydroxyprolinol Hyp-(GalNAc-alkyl)3
tcagcatgccaatatgtgtgg

SEQ ID NO: 2957 - RNA, 23 nt, synthetic construct
  source 1..23: mol_type = other RNA; note = Description of Artificial Sequence: Synthetic oligonucleotide
  modified_base 1: mod_base = OTHER; note = 2'-O-methylcytidine-3'-phosphorothioate
  modified_base 2: mod_base = OTHER; note = 2'-fluorocytidine-3'-phosphorothioate
  modified_base 3: mod_base = OTHER; note = 2'-O-methyladenosine-3'-phosphate
  modified_base 4: mod_base = OTHER; note = 2'-O-methylcytidine-3'-phosphate
  modified_base 5: mod_base = OTHER; note = 2'-O-methyladenosine-3'-phosphate
  modified_base 6: mod_base = OTHER; note = 2'-fluorocytidine-3'-phosphate
  modified_base 7: mod_base = OTHER; note = 2'-O-methyladenosine-3'-phosphate
  modified_base 8: mod_base = OTHER; note = 2'-fluorouridine-3'-phosphate
  modified_base 9: mod_base = OTHER; note = 2'-fluoroadenosine-3'-phosphate
  modified_base 10: mod_base = OTHER; note = 2'-O-methyluridine-3'-phosphate
  modified_base 11: mod_base = OTHER; note = 2'-O-methyluridine-3'-phosphate
  modified_base 12: mod_base = OTHER; note = 2'-O-methylguanosine-3'-phosphate
  modified_base 13: mod_base = OTHER; note = 2'-O-methylguanosine-3'-phosphate
  modified_base 14: mod_base = OTHER; note = 2'-fluorocytidine-3'-phosphate
  modified_base 15: mod_base = OTHER; note = 2'-O-methyladenosine-3'-phosphate
  modified_base 16: mod_base = OTHER; note = 2'-fluorouridine-3'-phosphate
  modified_base 17: mod_base = OTHER; note = 2'-O-methylguanosine-3'-phosphate
  modified_base 18: mod_base = OTHER; note = 2'-O-methylcytidine-3'-phosphate
  modified_base 19: mod_base = OTHER; note = 2'-O-methyluridine-3'-phosphate
  modified_base 20: mod_base = OTHER; note = 2'-O-methylguanosine-3'-phosphate
  modified_base 21: mod_base = OTHER; note = 2'-O-methyladenosine-3'-phosphorothioate
  modified_base 22: mod_base = OTHER; note = 2'-O-methylcytidine-3'-phosphorothioate
  modified_base 23: mod_base = OTHER; note = 2'-O-methylcytidine-3'-phosphate
ccacacatattggcatgctgacc

SEQ ID NO: 2958 - RNA, 21 nt, synthetic construct
  source 1..21: mol_type = other RNA; note = Description of Artificial Sequence: Synthetic oligonucleotide
  modified_base 1: mod_base = OTHER; note = 2'-O-methylguanosine-3'-phosphorothioate
  modified_base 2: mod_base = OTHER; note = 2'-O-methyladenosine-3'-phosphorothioate
  modified_base 3: mod_base = OTHER; note = 2'-O-methylguanosine-3'-phosphate
  modified_base 4: mod_base = OTHER; note = 2'-O-methylguanosine-3'-phosphate
  modified_base 5: mod_base = OTHER; note = 2'-O-methylguanosine-3'-phosphate
  modified_base 6: mod_base = OTHER; note = 2'-O-methyluridine-3'-phosphate
  modified_base 7: mod_base = OTHER; note = 2'-fluorocytidine-3'-phosphate
  modified_base 8: mod_base = OTHER; note = 2'-O-methyladenosine-3'-phosphate
  modified_base 9: mod_base = OTHER; note = 2'-fluoroguanosine-3'-phosphate
  modified_base 10: mod_base = OTHER; note = 2'-fluorocytidine-3'-phosphate
  modified_base 11: mod_base = OTHER; note = 2'-fluoroadenosine-3'-phosphate
  modified_base 12: mod_base = OTHER; note = 2'-O-methyluridine-3'-phosphate
  modified_base 13: mod_base = OTHER; note = 2'-O-methylguanosine-3'-phosphate
  modified_base 14: mod_base = OTHER; note = 2'-O-methylcytidine-3'-phosphate
  modified_base 15: mod_base = OTHER; note = 2'-O-methylcytidine-3'-phosphate
  modified_base 16: mod_base = OTHER; note = 2'-O-methyladenosine-3'-phosphate
  modified_base 17: mod_base = OTHER; note = 2'-O-methyladenosine-3'-phosphate
  modified_base 18: mod_base = OTHER; note = 2'-O-methyluridine-3'-phosphate
  modified_base 19: mod_base = OTHER; note = 2'-O-methyladenosine-3'-phosphate
  modified_base 20: mod_base = OTHER; note = 2'-O-methyluridine-3'-phosphate
  modified_base 21: mod_base = OTHER; note = 2'-O-methylguanosine-3'-phosphate N-[tris(GalNAc-alkyl)-amidodecanoyl)]-4-hydroxyprolinol Hyp-(GalNAc-alkyl)3
gagggtcagcatgccaatatg

SEQ ID NO: 2959 - RNA, 23 nt, synthetic construct
  source 1..23: mol_type = other RNA; note = Description of Artificial Sequence: Synthetic oligonucleotide
  modified_base 1: mod_base = OTHER; note = 2'-O-methylcytidine-3'-phosphorothioate
  modified_base 2: mod_base = OTHER; note = 2'-fluoroadenosine-3'-phosphorothioate
  modified_base 3: mod_base = OTHER; note = 2'-O-methyluridine-3'-phosphate
  modified_base 4: mod_base = OTHER; note = 2'-O-methyladenosine-3'-phosphate
  modified_base 5: mod_base = OTHER; note = 2'-O-methyluridine-3'-phosphate
  modified_base 6: mod_base = OTHER; note = 2'-fluorouridine-3'-phosphate
  modified_base 7: mod_base = OTHER; note = 2'-O-methylguanosine-3'-phosphate
  modified_base 8: mod_base = OTHER; note = 2'-fluoroguanosine-3'-phosphate
  modified_base 9: mod_base = OTHER; note = 2'-fluorocytidine-3'-phosphate
  modified_base 10: mod_base = OTHER; note = 2'-O-methyladenosine-3'-phosphate
  modified_base 11: mod_base = OTHER; note = 2'-O-methyluridine-3'-phosphate
  modified_base 12: mod_base = OTHER; note = 2'-O-methylguanosine-3'-phosphate
  modified_base 13: mod_base = OTHER; note = 2'-O-methylcytidine-3'-phosphate
  modified_base 14: mod_base = OTHER; note = 2'-fluorouridine-3'-phosphate
  modified_base 15: mod_base = OTHER; note = 2'-O-methylguanosine-3'-phosphate
  modified_base 16: mod_base = OTHER; note = 2'-fluoroadenosine-3'-phosphate
  modified_base 17: mod_base = OTHER; note = 2'-O-methylcytidine-3'-phosphate
  modified_base 18: mod_base = OTHER; note = 2'-O-methylcytidine-3'-phosphate
  modified_base 19: mod_base = OTHER; note = 2'-O-methylcytidine-3'-phosphate
  modified_base 20: mod_base = OTHER; note = 2'-O-methyluridine-3'-phosphate
  modified_base 21: mod_base = OTHER; note = 2'-O-methylcytidine-3'-phosphorothioate
  modified_base 22: mod_base = OTHER; note = 2'-O-methyluridine-3'-phosphorothioate
  modified_base 23: mod_base = OTHER; note = 2'-O-methylguanosine-3'-phosphate
catattggcatgctgaccctctg

SEQ ID NO: 2960 - RNA, 21 nt, synthetic construct
  source 1..21: mol_type = other RNA; note = Description of Artificial Sequence: Synthetic oligonucleotide
  modified_base 1: mod_base = OTHER; note = 2'-O-methyladenosine-3'-phosphorothioate
  modified_base 2: mod_base = OTHER; note = 2'-O-methylguanosine-3'-phosphorothioate
  modified_base 3: mod_base = OTHER; note = 2'-O-methyladenosine-3'-phosphate
  modified_base 4: mod_base = OTHER; note = 2'-O-methylguanosine-3'-phosphate
  modified_base 5: mod_base = OTHER; note = 2'-O-methylguanosine-3'-phosphate
  modified_base 6: mod_base = OTHER; note = 2'-O-methylguanosine-3'-phosphate
  modified_base 7: mod_base = OTHER; note = 2'-fluorouridine-3'-phosphate
  modified_base 8: mod_base = OTHER; note = 2'-O-methylcytidine-3'-phosphate
  modified_base 9: mod_base = OTHER; note = 2'-fluoroadenosine-3'-phosphate
  modified_base 10: mod_base = OTHER; note = 2'-fluoroguanosine-3'-phosphate
  modified_base 11: mod_base = OTHER; note = 2'-fluorocytidine-3'-phosphate
  modified_base 12: mod_base = OTHER; note = 2'-O-methyladenosine-3'-phosphate
  modified_base 13: mod_base = OTHER; note = 2'-O-methyluridine-3'-phosphate
  modified_base 14: mod_base = OTHER; note = 2'-O-methylguanosine-3'-phosphate
  modified_base 15: mod_base = OTHER; note = 2'-O-methylcytidine-3'-phosphate
  modified_base 16: mod_base = OTHER; note = 2'-O-methylcytidine-3'-phosphate
  modified_base 17: mod_base = OTHER; note = 2'-O-methyladenosine-3'-phosphate
  modified_base 18: mod_base = OTHER; note = 2'-O-methyladenosine-3'-phosphate
  modified_base 19: mod_base = OTHER; note = 2'-O-methyluridine-3'-phosphate
  modified_base 20: mod_base = OTHER; note = 2'-O-methyladenosine-3'-phosphate
  modified_base 21: mod_base = OTHER; note = 2'-O-methyluridine-3'-phosphate N-[tris(GalNAc-alkyl)-amidodecanoyl)]-4-hydroxyprolinol Hyp-(GalNAc-alkyl)3
agagggtcagcatgccaatat

SEQ ID NO: 2961 - RNA, 23 nt, synthetic construct
  source 1..23: mol_type = other RNA; note = Description of Artificial Sequence: Synthetic oligonucleotide
  modified_base 1: mod_base = OTHER; note = 2'-O-methyladenosine-3'-phosphorothioate
  modified_base 2: mod_base = OTHER; note = 2'-fluorouridine -3'-phosphorothioate
  modified_base 3: mod_base = OTHER; note = 2'-O-methyladenosine-3'-phosphate
  modified_base 4: mod_base = OTHER; note = 2'-O-methyluridine-3'-phosphate
  modified_base 5: mod_base = OTHER; note = 2'-O-methyluridine-3'-phosphate
  modified_base 6: mod_base = OTHER; note = 2'-fluoroguanosine-3'-phosphate
  modified_base 7: mod_base = OTHER; note = 2'-O-methylguanosine-3'-phosphate
  modified_base 8: mod_base = OTHER; note = 2'-fluorocytidine-3'-phosphate
  modified_base 9: mod_base = OTHER; note = 2'-fluoroadenosine-3'-phosphate
  modified_base 10: mod_base = OTHER; note = 2'-O-methyluridine-3'-phosphate
  modified_base 11: mod_base = OTHER; note = 2'-O-methylguanosine-3'-phosphate
  modified_base 12: mod_base = OTHER; note = 2'-O-methylcytidine-3'-phosphate
  modified_base 13: mod_base = OTHER; note = 2'-O-methyluridine-3'-phosphate
  modified_base 14: mod_base = OTHER; note = 2'-fluoroguanosine-3'-phosphate
  modified_base 15: mod_base = OTHER; note = 2'-O-methyladenosine-3'-phosphate
  modified_base 16: mod_base = OTHER; note = 2'-fluorocytidine-3'-phosphate
  modified_base 17: mod_base = OTHER; note = 2'-O-methylcytidine-3'-phosphate
  modified_base 18: mod_base = OTHER; note = 2'-O-methylcytidine-3'-phosphate
  modified_base 19: mod_base = OTHER; note = 2'-O-methyluridine-3'-phosphate
  modified_base 20: mod_base = OTHER; note = 2'-O-methylcytidine-3'-phosphate
  modified_base 21: mod_base = OTHER; note = 2'-O-methyluridine-3'-phosphorothioate
  modified_base 22: mod_base = OTHER; note = 2'-O-methylguanosine-3'-phosphorothioate
  modified_base 23: mod_base = OTHER; note = 2'-O-methyluridine-3'-phosphate
atattggcatgctgaccctctgt

SEQ ID NO: 2962 - RNA, 21 nt, synthetic construct
  source 1..21: mol_type = other RNA; note = Description of Artificial Sequence: Synthetic oligonucleotide
  modified_base 1: mod_base = OTHER; note = 2'-O-methylguanosine-3'-phosphorothioate
  modified_base 2: mod_base = OTHER; note = 2'-O-methyladenosine-3'-phosphorothioate
  modified_base 3: mod_base = OTHER; note = 2'-O-methyluridine-3'-phosphate
  modified_base 4: mod_base = OTHER; note = 2'-O-methylguanosine-3'-phosphate
  modified_base 5: mod_base = OTHER; note = 2'-O-methylcytidine-3'-phosphate
  modified_base 6: mod_base = OTHER; note = 2'-O-methyluridine-3'-phosphate
  modified_base 7: mod_base = OTHER; note = 2'-fluorocytidine-3'-phosphate
  modified_base 8: mod_base = OTHER; note = 2'-O-methylcytidine-3'-phosphate
  modified_base 9: mod_base = OTHER; note = 2'-fluoroguanosine-3'-phosphate
  modified_base 10: mod_base = OTHER; note = 2'-fluoroguanosine-3'-phosphate
  modified_base 11: mod_base = OTHER; note = 2'-fluoroadenosine-3'-phosphate
  modified_base 12: mod_base = OTHER; note = 2'-O-methyladenosine-3'-phosphate
  modified_base 13: mod_base = OTHER; note = 2'-O-methyluridine-3'-phosphate
  modified_base 14: mod_base = OTHER; note = 2'-O-methylguanosine-3'-phosphate
  modified_base 15: mod_base = OTHER; note = 2'-O-methyluridine-3'-phosphate
  modified_base 16: mod_base = OTHER; note = 2'-O-methyluridine-3'-phosphate
  modified_base 17: mod_base = OTHER; note = 2'-O-methylguanosine-3'-phosphate
  modified_base 18: mod_base = OTHER; note = 2'-O-methylcytidine-3'-phosphate
  modified_base 19: mod_base = OTHER; note = 2'-O-methyluridine-3'-phosphate
  modified_base 20: mod_base = OTHER; note = 2'-O-methylguanosine-3'-phosphate
  modified_base 21: mod_base = OTHER; note = 2'-O-methyladenosine-3'-phosphate N-[tris(GalNAc-alkyl)-amidodecanoyl)]-4-hydroxyprolinol Hyp-(GalNAc-alkyl)3
gatgctccggaatgttgctga

SEQ ID NO: 2963 - RNA, 23 nt, synthetic construct
  source 1..23: mol_type = other RNA; note = Description of Artificial Sequence: Synthetic oligonucleotide
  modified_base 1: mod_base = OTHER; note = 2'-O-methyluridine-3'-phosphorothioate
  modified_base 2: mod_base = OTHER; note = 2'-fluorocytidine-3'-phosphorothioate
  modified_base 3: mod_base = OTHER; note = 2'-O-methyladenosine-3'-phosphate
  modified_base 4: mod_base = OTHER; note = 2'-O-methylguanosine-3'-phosphate
  modified_base 5: mod_base = OTHER; note = 2'-O-methylcytidine-3'-phosphate
  modified_base 6: mod_base = OTHER; note = 2'-fluoroadenosine-3'-phosphate
  modified_base 7: mod_base = OTHER; note = 2'-O-methyladenosine-3'-phosphate
  modified_base 8: mod_base = OTHER; note = 2'-fluorocytidine-3'-phosphate
  modified_base 9: mod_base = OTHER; note = 2'-fluoroadenosine-3'-phosphate
  modified_base 10: mod_base = OTHER; note = 2'-O-methyluridine-3'-phosphate
  modified_base 11: mod_base = OTHER; note = 2'-O-methyluridine-3'-phosphate
  modified_base 12: mod_base = OTHER; note = 2'-O-methylcytidine-3'-phosphate
  modified_base 13: mod_base = OTHER; note = 2'-O-methylcytidine-3'-phosphate
  modified_base 14: mod_base = OTHER; note = 2'-fluoroguanosine-3'-phosphate
  modified_base 15: mod_base = OTHER; note = 2'-O-methylguanosine-3'-phosphate
  modified_base 16: mod_base = OTHER; note = 2'-fluoroadenosine-3'-phosphate
  modified_base 17: mod_base = OTHER; note = 2'-O-methylguanosine-3'-phosphate
  modified_base 18: mod_base = OTHER; note = 2'-O-methylcytidine-3'-phosphate
  modified_base 19: mod_base = OTHER; note = 2'-O-methyladenosine-3'-phosphate
  modified_base 20: mod_base = OTHER; note = 2'-O-methyluridine-3'-phosphate
  modified_base 21: mod_base = OTHER; note = 2'-O-methylcytidine-3'-phosphorothioate
  modified_base 22: mod_base = OTHER; note = 2'-O-methylcytidine-3'-phosphorothioate
  modified_base 23: mod_base = OTHER; note = 2'-O-methyluridine-3'-phosphate
tcagcaacattccggagcatcct

SEQ ID NO: 2964 - RNA, 21 nt, synthetic construct
  source 1..21: mol_type = other RNA; note = Description of Artificial Sequence: Synthetic oligonucleotide
  modified_base 1: mod_base = OTHER; note = 2'-O-methyladenosine-3'-phosphorothioate
  modified_base 2: mod_base = OTHER; note = 2'-O-methyluridine-3'-phosphorothioate
  modified_base 3: mod_base = OTHER; note = 2'-O-methylguanosine-3'-phosphate
  modified_base 4: mod_base = OTHER; note = 2'-O-methylcytidine-3'-phosphate
  modified_base 5: mod_base = OTHER; note = 2'-O-methyluridine-3'-phosphate
  modified_base 6: mod_base = OTHER; note = 2'-O-methylcytidine-3'-phosphate
  modified_base 7: mod_base = OTHER; note = 2'-fluorocytidine-3'-phosphate
  modified_base 8: mod_base = OTHER; note = 2'-O-methylguanosine-3'-phosphate
  modified_base 9: mod_base = OTHER; note = 2'-fluoroguanosine-3'-phosphate
  modified_base 10: mod_base = OTHER; note = 2'-fluoroadenosine-3'-phosphate
  modified_base 11: mod_base = OTHER; note = 2'-fluoroadenosine-3'-phosphate
  modified_base 12: mod_base = OTHER; note = 2'-O-methyluridine-3'-phosphate
  modified_base 13: mod_base = OTHER; note = 2'-O-methylguanosine-3'-phosphate
  modified_base 14: mod_base = OTHER; note = 2'-O-methyluridine-3'-phosphate
  modified_base 15: mod_base = OTHER; note = 2'-O-methyluridine-3'-phosphate
  modified_base 16: mod_base = OTHER; note = 2'-O-methylguanosine-3'-phosphate
  modified_base 17: mod_base = OTHER; note = 2'-O-methylcytidine-3'-phosphate
  modified_base 18: mod_base = OTHER; note = 2'-O-methyluridine-3'-phosphate
  modified_base 19: mod_base = OTHER; note = 2'-O-methylguanosine-3'-phosphate
  modified_base 20: mod_base = OTHER; note = 2'-O-methyladenosine-3'-phosphate
  modified_base 21: mod_base = OTHER; note = 2'-O-methyladenosine-3'-phosphate N-[tris(GalNAc-alkyl)-amidodecanoyl)]-4-hydroxyprolinol Hyp-(GalNAc-alkyl)3
atgctccggaatgttgctgaa

SEQ ID NO: 2965 - RNA, 23 nt, synthetic construct
  source 1..23: mol_type = other RNA; note = Description of Artificial Sequence: Synthetic oligonucleotide
  modified_base 1: mod_base = OTHER; note = 2'-O-methyluridine-3'-phosphorothioate
  modified_base 2: mod_base = OTHER; note = 2'-fluorouridine -3'-phosphorothioate
  modified_base 3: mod_base = OTHER; note = 2'-O-methylcytidine-3'-phosphate
  modified_base 4: mod_base = OTHER; note = 2'-O-methyladenosine-3'-phosphate
  modified_base 5: mod_base = OTHER; note = 2'-O-methylguanosine-3'-phosphate
  modified_base 6: mod_base = OTHER; note = 2'-fluorocytidine-3'-phosphate
  modified_base 7: mod_base = OTHER; note = 2'-O-methyladenosine-3'-phosphate
  modified_base 8: mod_base = OTHER; note = 2'-fluoroadenosine-3'-phosphate
  modified_base 9: mod_base = OTHER; note = 2'-fluorocytidine-3'-phosphate
  modified_base 10: mod_base = OTHER; note = 2'-O-methyladenosine-3'-phosphate
  modified_base 11: mod_base = OTHER; note = 2'-O-methyluridine-3'-phosphate
  modified_base 12: mod_base = OTHER; note = 2'-O-methyluridine-3'-phosphate
  modified_base 13: mod_base = OTHER; note = 2'-O-methylcytidine-3'-phosphate
  modified_base 14: mod_base = OTHER; note = 2'-fluorocytidine-3'-phosphate
  modified_base 15: mod_base = OTHER; note = 2'-O-methylguanosine-3'-phosphate
  modified_base 16: mod_base = OTHER; note = 2'-fluoroguanosine-3'-phosphate
  modified_base 17: mod_base = OTHER; note = 2'-O-methyladenosine-3'-phosphate
  modified_base 18: mod_base = OTHER; note = 2'-O-methylguanosine-3'-phosphate
  modified_base 19: mod_base = OTHER; note = 2'-O-methylcytidine-3'-phosphate
  modified_base 20: mod_base = OTHER; note = 2'-O-methyladenosine-3'-phosphate
  modified_base 21: mod_base = OTHER; note = 2'-O-methyluridine-3'-phosphorothioate
  modified_base 22: mod_base = OTHER; note = 2'-O-methylcytidine-3'-phosphorothioate
  modified_base 23: mod_base = OTHER; note = 2'-O-methylcytidine-3'-phosphate
ttcagcaacattccggagcatcc

SEQ ID NO: 2966 - RNA, 21 nt, synthetic construct
  source 1..21: mol_type = other RNA; note = Description of Artificial Sequence: Synthetic oligonucleotide
  modified_base 1: mod_base = OTHER; note = 2'-O-methylcytidine-3'-phosphorothioate
  modified_base 2: mod_base = OTHER; note = 2'-O-methyladenosine-3'-phosphorothioate
  modified_base 3: mod_base = OTHER; note = 2'-O-methyladenosine-3'-phosphate
  modified_base 4: mod_base = OTHER; note = 2'-O-methylguanosine-3'-phosphate
  modified_base 5: mod_base = OTHER; note = 2'-O-methylguanosine-3'-phosphate
  modified_base 6: mod_base = OTHER; note = 2'-O-methyladenosine-3'-phosphate
  modified_base 7: mod_base = OTHER; note = 2'-fluorouridine-3'-phosphate
  modified_base 8: mod_base = OTHER; note = 2'-O-methylguanosine-3'-phosphate
  modified_base 9: mod_base = OTHER; note = 2'-fluorocytidine-3'-phosphate
  modified_base 10: mod_base = OTHER; note = 2'-fluorouridine-3'-phosphate
  modified_base 11: mod_base = OTHER; note = 2'-fluorocytidine-3'-phosphate
  modified_base 12: mod_base = OTHER; note = 2'-O-methylcytidine-3'-phosphate
  modified_base 13: mod_base = OTHER; note = 2'-O-methylguanosine-3'-phosphate
  modified_base 14: mod_base = OTHER; note = 2'-O-methylguanosine-3'-phosphate
  modified_base 15: mod_base = OTHER; note = 2'-O-methyladenosine-3'-phosphate
  modified_base 16: mod_base = OTHER; note = 2'-O-methyladenosine-3'-phosphate
  modified_base 17: mod_base = OTHER; note = 2'-O-methyluridine-3'-phosphate
  modified_base 18: mod_base = OTHER; note = 2'-O-methylguanosine-3'-phosphate
  modified_base 19: mod_base = OTHER; note = 2'-O-methyluridine-3'-phosphate
  modified_base 20: mod_base = OTHER; note = 2'-O-methyluridine-3'-phosphate
  modified_base 21: mod_base = OTHER; note = 2'-O-methylguanosine-3'-phosphate N-[tris(GalNAc-alkyl)-amidodecanoyl)]-4-hydroxyprolinol Hyp-(GalNAc-alkyl)3
caaggatgctccggaatgttg

SEQ ID NO: 2967 - RNA, 23 nt, synthetic construct
  source 1..23: mol_type = other RNA; note = Description of Artificial Sequence: Synthetic oligonucleotide
  modified_base 1: mod_base = OTHER; note = 2'-O-methylcytidine-3'-phosphorothioate
  modified_base 2: mod_base = OTHER; note = 2'-fluoroadenosine-3'-phosphorothioate
  modified_base 3: mod_base = OTHER; note = 2'-O-methyladenosine-3'-phosphate
  modified_base 4: mod_base = OTHER; note = 2'-O-methylcytidine-3'-phosphate
  modified_base 5: mod_base = OTHER; note = 2'-O-methyladenosine-3'-phosphate
  modified_base 6: mod_base = OTHER; note = 2'-fluorouridine-3'-phosphate
  modified_base 7: mod_base = OTHER; note = 2'-O-methyluridine-3'-phosphate
  modified_base 8: mod_base = OTHER; note = 2'-fluorocytidine-3'-phosphate
  modified_base 9: mod_base = OTHER; note = 2'-fluorocytidine-3'-phosphate
  modified_base 10: mod_base = OTHER; note = 2'-O-methylguanosine-3'-phosphate
  modified_base 11: mod_base = OTHER; note = 2'-O-methylguanosine-3'-phosphate
  modified_base 12: mod_base = OTHER; note = 2'-O-methyladenosine-3'-phosphate
  modified_base 13: mod_base = OTHER; note = 2'-O-methylguanosine-3'-phosphate
  modified_base 14: mod_base = OTHER; note = 2'-fluorocytidine-3'-phosphate
  modified_base 15: mod_base = OTHER; note = 2'-O-methyladenosine-3'-phosphate
  modified_base 16: mod_base = OTHER; note = 2'-fluorouridine-3'-phosphate
  modified_base 17: mod_base = OTHER; note = 2'-O-methylcytidine-3'-phosphate
  modified_base 18: mod_base = OTHER; note = 2'-O-methylcytidine-3'-phosphate
  modified_base 19: mod_base = OTHER; note = 2'-O-methyluridine-3'-phosphate
  modified_base 20: mod_base = OTHER; note = 2'-O-methyluridine-3'-phosphate
  modified_base 21: mod_base = OTHER; note = 2'-O-methylguanosine-3'-phosphorothioate
  modified_base 22: mod_base = OTHER; note = 2'-O-methylguanosine-3'-phosphorothioate
  modified_base 23: mod_base = OTHER; note = 2'-O-methyladenosine-3'-phosphate
caacattccggagcatccttgga

SEQ ID NO: 2968 - RNA, 21 nt, synthetic construct
  source 1..21: mol_type = other RNA; note = Description of Artificial Sequence: Synthetic oligonucleotide
  modified_base 1: mod_base = OTHER; note = 2'-O-methylcytidine-3'-phosphorothioate
  modified_base 2: mod_base = OTHER; note = 2'-O-methylcytidine-3'-phosphorothioate
  modified_base 3: mod_base = OTHER; note = 2'-O-methyladenosine-3'-phosphate
  modified_base 4: mod_base = OTHER; note = 2'-O-methyladenosine-3'-phosphate
  modified_base 5: mod_base = OTHER; note = 2'-O-methylguanosine-3'-phosphate
  modified_base 6: mod_base = OTHER; note = 2'-O-methylguanosine-3'-phosphate
  modified_base 7: mod_base = OTHER; note = 2'-fluoroadenosine-3'-phosphate
  modified_base 8: mod_base = OTHER; note = 2'-O-methyluridine-3'-phosphate
  modified_base 9: mod_base = OTHER; note = 2'-fluoroguanosine-3'-phosphate
  modified_base 10: mod_base = OTHER; note = 2'-fluorocytidine-3'-phosphate
  modified_base 11: mod_base = OTHER; note = 2'-fluorouridine-3'-phosphate
  modified_base 12: mod_base = OTHER; note = 2'-O-methylcytidine-3'-phosphate
  modified_base 13: mod_base = OTHER; note = 2'-O-methylcytidine-3'-phosphate
  modified_base 14: mod_base = OTHER; note = 2'-O-methylguanosine-3'-phosphate
  modified_base 15: mod_base = OTHER; note = 2'-O-methylguanosine-3'-phosphate
  modified_base 16: mod_base = OTHER; note = 2'-O-methyladenosine-3'-phosphate
  modified_base 17: mod_base = OTHER; note = 2'-O-methyladenosine-3'-phosphate
  modified_base 18: mod_base = OTHER; note = 2'-O-methyluridine-3'-phosphate
  modified_base 19: mod_base = OTHER; note = 2'-O-methylguanosine-3'-phosphate
  modified_base 20: mod_base = OTHER; note = 2'-O-methyluridine-3'-phosphate
  modified_base 21: mod_base = OTHER; note = 2'-O-methyluridine-3'-phosphate N-[tris(GalNAc-alkyl)-amidodecanoyl)]-4-hydroxyprolinol Hyp-(GalNAc-alkyl)3
ccaaggatgctccggaatgtt

SEQ ID NO: 2969 - RNA, 23 nt, synthetic construct
  source 1..23: mol_type = other RNA; note = Description of Artificial Sequence: Synthetic oligonucleotide
  modified_base 1: mod_base = OTHER; note = 2'-O-methyladenosine-3'-phosphorothioate
  modified_base 2: mod_base = OTHER; note = 2'-fluoroadenosine-3'-phosphorothioate
  modified_base 3: mod_base = OTHER; note = 2'-O-methylcytidine-3'-phosphate
  modified_base 4: mod_base = OTHER; note = 2'-O-methyladenosine-3'-phosphate
  modified_base 5: mod_base = OTHER; note = 2'-O-methyluridine-3'-phosphate
  modified_base 6: mod_base = OTHER; note = 2'-fluorouridine-3'-phosphate
  modified_base 7: mod_base = OTHER; note = 2'-O-methylcytidine-3'-phosphate
  modified_base 8: mod_base = OTHER; note = 2'-fluorocytidine-3'-phosphate
  modified_base 9: mod_base = OTHER; note = 2'-fluoroguanosine-3'-phosphate
  modified_base 10: mod_base = OTHER; note = 2'-O-methylguanosine-3'-phosphate
  modified_base 11: mod_base = OTHER; note = 2'-O-methyladenosine-3'-phosphate
  modified_base 12: mod_base = OTHER; note = 2'-O-methylguanosine-3'-phosphate
  modified_base 13: mod_base = OTHER; note = 2'-O-methylcytidine-3'-phosphate
  modified_base 14: mod_base = OTHER; note = 2'-fluoroadenosine-3'-phosphate
  modified_base 15: mod_base = OTHER; note = 2'-O-methyluridine-3'-phosphate
  modified_base 16: mod_base = OTHER; note = 2'-fluorocytidine-3'-phosphate
  modified_base 17: mod_base = OTHER; note = 2'-O-methylcytidine-3'-phosphate
  modified_base 18: mod_base = OTHER; note = 2'-O-methyluridine-3'-phosphate
  modified_base 19: mod_base = OTHER; note = 2'-O-methyluridine-3'-phosphate
  modified_base 20: mod_base = OTHER; note = 2'-O-methylguanosine-3'-phosphate
  modified_base 21: mod_base = OTHER; note = 2'-O-methylguanosine-3'-phosphorothioate
  modified_base 22: mod_base = OTHER; note = 2'-O-methyladenosine-3'-phosphorothioate
  modified_base 23: mod_base = OTHER; note = 2'-O-methyluridine-3'-phosphate
aacattccggagcatccttggat

SEQ ID NO: 2970 - RNA, 21 nt, synthetic construct
  source 1..21: mol_type = other RNA; note = Description of Artificial Sequence: Synthetic oligonucleotide
  modified_base 1: mod_base = OTHER; note = 2'-O-methylguanosine-3'-phosphorothioate
  modified_base 2: mod_base = OTHER; note = 2'-O-methylcytidine-3'-phosphorothioate
  modified_base 3: mod_base = OTHER; note = 2'-O-methylguanosine-3'-phosphate
  modified_base 4: mod_base = OTHER; note = 2'-O-methyluridine-3'-phosphate
  modified_base 5: mod_base = OTHER; note = 2'-O-methyladenosine-3'-phosphate
  modified_base 6: mod_base = OTHER; note = 2'-O-methyladenosine-3'-phosphate
  modified_base 7: mod_base = OTHER; note = 2'-fluorocytidine-3'-phosphate
  modified_base 8: mod_base = OTHER; note = 2'-O-methyladenosine-3'-phosphate
  modified_base 9: mod_base = OTHER; note = 2'-fluoroguanosine-3'-phosphate
  modified_base 10: mod_base = OTHER; note = 2'-fluoroadenosine-3'-phosphate
  modified_base 11: mod_base = OTHER; note = 2'-fluorouridine-3'-phosphate
  modified_base 12: mod_base = OTHER; note = 2'-O-methyluridine-3'-phosphate
  modified_base 13: mod_base = OTHER; note = 2'-O-methylcytidine-3'-phosphate
  modified_base 14: mod_base = OTHER; note = 2'-O-methyladenosine-3'-phosphate
  modified_base 15: mod_base = OTHER; note = 2'-O-methyladenosine-3'-phosphate
  modified_base 16: mod_base = OTHER; note = 2'-O-methyladenosine-3'-phosphate
  modified_base 17: mod_base = OTHER; note = 2'-O-methylcytidine-3'-phosphate
  modified_base 18: mod_base = OTHER; note = 2'-O-methyluridine-3'-phosphate
  modified_base 19: mod_base = OTHER; note = 2'-O-methylguanosine-3'-phosphate
  modified_base 20: mod_base = OTHER; note = 2'-O-methylcytidine-3'-phosphate
  modified_base 21: mod_base = OTHER; note = 2'-O-methylcytidine-3'-phosphate N-[tris(GalNAc-alkyl)-amidodecanoyl)]-4-hydroxyprolinol Hyp-(GalNAc-alkyl)3
gcgtaacagattcaaactgcc

SEQ ID NO: 2971 - RNA, 23 nt, synthetic construct
  source 1..23: mol_type = other RNA; note = Description of Artificial Sequence: Synthetic oligonucleotide
  modified_base 1: mod_base = OTHER; note = 2'-O-methylguanosine-3'-phosphorothioate
  modified_base 2: mod_base = OTHER; note = 2'-fluoroguanosine-3'-phosphorothioate
  modified_base 3: mod_base = OTHER; note = 2'-O-methylcytidine-3'-phosphate
  modified_base 4: mod_base = OTHER; note = 2'-O-methyladenosine-3'-phosphate
  modified_base 5: mod_base = OTHER; note = 2'-O-methylguanosine-3'-phosphate
  modified_base 6: mod_base = OTHER; note = 2'-fluorouridine-3'-phosphate
  modified_base 7: mod_base = OTHER; note = 2'-O-methyluridine-3'-phosphate
  modified_base 8: mod_base = OTHER; note = 2'-fluorouridine-3'-phosphate
  modified_base 9: mod_base = OTHER; note = 2'-fluoroguanosine-3'-phosphate
  modified_base 10: mod_base = OTHER; note = 2'-O-methyladenosine-3'-phosphate
  modified_base 11: mod_base = OTHER; note = 2'-O-methyladenosine-3'-phosphate
  modified_base 12: mod_base = OTHER; note = 2'-O-methyluridine-3'-phosphate
  modified_base 13: mod_base = OTHER; note = 2'-O-methylcytidine-3'-phosphate
  modified_base 14: mod_base = OTHER; note = 2'-fluorouridine-3'-phosphate
  modified_base 15: mod_base = OTHER; note = 2'-O-methylguanosine-3'-phosphate
  modified_base 16: mod_base = OTHER; note = 2'-fluorouridine-3'-phosphate
  modified_base 17: mod_base = OTHER; note = 2'-O-methyluridine-3'-phosphate
  modified_base 18: mod_base = OTHER; note = 2'-O-methyladenosine-3'-phosphate
  modified_base 19: mod_base = OTHER; note = 2'-O-methylcytidine-3'-phosphate
  modified_base 20: mod_base = OTHER; note = 2'-O-methylguanosine-3'-phosphate
  modified_base 21: mod_base = OTHER; note = 2'-O-methylcytidine-3'-phosphorothioate
  modified_base 22: mod_base = OTHER; note = 2'-O-methyladenosine-3'-phosphorothioate
  modified_base 23: mod_base = OTHER; note = 2'-O-methylcytidine-3'-phosphate
ggcagtttgaatctgttacgcac

SEQ ID NO: 2972 - RNA, 21 nt, synthetic construct
  source 1..21: mol_type = other RNA; note = Description of Artificial Sequence: Synthetic oligonucleotide
  modified_base 1: mod_base = OTHER; note = 2'-O-methylcytidine-3'-phosphorothioate
  modified_base 2: mod_base = OTHER; note = 2'-O-methylguanosine-3'-phosphorothioate
  modified_base 3: mod_base = OTHER; note = 2'-O-methyluridine-3'-phosphate
  modified_base 4: mod_base = OTHER; note = 2'-O-methyladenosine-3'-phosphate
  modified_base 5: mod_base = OTHER; note = 2'-O-methyladenosine-3'-phosphate
  modified_base 6: mod_base = OTHER; note = 2'-O-methylcytidine-3'-phosphate
  modified_base 7: mod_base = OTHER; note = 2'-fluoroadenosine-3'-phosphate
  modified_base 8: mod_base = OTHER; note = 2'-O-methylguanosine-3'-phosphate
  modified_base 9: mod_base = OTHER; note = 2'-fluoroadenosine-3'-phosphate
  modified_base 10: mod_base = OTHER; note = 2'-fluorouridine-3'-phosphate
  modified_base 11: mod_base = OTHER; note = 2'-fluorouridine-3'-phosphate
  modified_base 12: mod_base = OTHER; note = 2'-O-methylcytidine-3'-phosphate
  modified_base 13: mod_base = OTHER; note = 2'-O-methyladenosine-3'-phosphate
  modified_base 14: mod_base = OTHER; note = 2'-O-methyladenosine-3'-phosphate
  modified_base 15: mod_base = OTHER; note = 2'-O-methyladenosine-3'-phosphate
  modified_base 16: mod_base = OTHER; note = 2'-O-methylcytidine-3'-phosphate
  modified_base 17: mod_base = OTHER; note = 2'-O-methyluridine-3'-phosphate
  modified_base 18: mod_base = OTHER; note = 2'-O-methylguanosine-3'-phosphate
  modified_base 19: mod_base = OTHER; note = 2'-O-methylcytidine-3'-phosphate
  modified_base 20: mod_base = OTHER; note = 2'-O-methylcytidine-3'-phosphate
  modified_base 21: mod_base = OTHER; note = 2'-O-methylguanosine-3'-phosphate N-[tris(GalNAc-alkyl)-amidodecanoyl)]-4-hydroxyprolinol Hyp-(GalNAc-alkyl)3
cgtaacagattcaaactgccg

SEQ ID NO: 2973 - RNA, 23 nt, synthetic construct
  source 1..23: mol_type = other RNA; note = Description of Artificial Sequence: Synthetic oligonucleotide
  modified_base 1: mod_base = OTHER; note = 2'-O-methylcytidine-3'-phosphorothioate
  modified_base 2: mod_base = OTHER; note = 2'-fluoroguanosine-3'-phosphorothioate
  modified_base 3: mod_base = OTHER; note = 2'-O-methylguanosine-3'-phosphate
  modified_base 4: mod_base = OTHER; note = 2'-O-methylcytidine-3'-phosphate
  modified_base 5: mod_base = OTHER; note = 2'-O-methyladenosine-3'-phosphate
  modified_base 6: mod_base = OTHER; note = 2'-fluoroguanosine-3'-phosphate
  modified_base 7: mod_base = OTHER; note = 2'-O-methyluridine-3'-phosphate
  modified_base 8: mod_base = OTHER; note = 2'-fluorouridine-3'-phosphate
  modified_base 9: mod_base = OTHER; note = 2'-fluorouridine-3'-phosphate
  modified_base 10: mod_base = OTHER; note = 2'-O-methylguanosine-3'-phosphate
  modified_base 11: mod_base = OTHER; note = 2'-O-methyladenosine-3'-phosphate
  modified_base 12: mod_base = OTHER; note = 2'-O-methyladenosine-3'-phosphate
  modified_base 13: mod_base = OTHER; note = 2'-O-methyluridine-3'-phosphate
  modified_base 14: mod_base = OTHER; note = 2'-fluorocytidine-3'-phosphate
  modified_base 15: mod_base = OTHER; note = 2'-O-methyluridine-3'-phosphate
  modified_base 16: mod_base = OTHER; note = 2'-fluoroguanosine-3'-phosphate
  modified_base 17: mod_base = OTHER; note = 2'-O-methyluridine-3'-phosphate
  modified_base 18: mod_base = OTHER; note = 2'-O-methyluridine-3'-phosphate
  modified_base 19: mod_base = OTHER; note = 2'-O-methyladenosine-3'-phosphate
  modified_base 20: mod_base = OTHER; note = 2'-O-methylcytidine-3'-phosphate
  modified_base 21: mod_base = OTHER; note = 2'-O-methylguanosine-3'-phosphorothioate
  modified_base 22: mod_base = OTHER; note = 2'-O-methylcytidine-3'-phosphorothioate
  modified_base 23: mod_base = OTHER; note = 2'-O-methyladenosine-3'-phosphate
cggcagtttgaatctgttacgca

SEQ ID NO: 2974 - RNA, 21 nt, synthetic construct
  source 1..21: mol_type = other RNA; note = Description of Artificial Sequence: Synthetic oligonucleotide
  modified_base 1: mod_base = OTHER; note = 2'-O-methyladenosine-3'-phosphorothioate
  modified_base 2: mod_base = OTHER; note = 2'-O-methyluridine-3'-phosphorothioate
  modified_base 3: mod_base = OTHER; note = 2'-O-methylguanosine-3'-phosphate
  modified_base 4: mod_base = OTHER; note = 2'-O-methyluridine-3'-phosphate
  modified_base 5: mod_base = OTHER; note = 2'-O-methylguanosine-3'-phosphate
  modified_base 6: mod_base = OTHER; note = 2'-O-methylcytidine-3'-phosphate
  modified_base 7: mod_base = OTHER; note = 2'-fluoroguanosine-3'-phosphate
  modified_base 8: mod_base = OTHER; note = 2'-O-methyluridine-3'-phosphate
  modified_base 9: mod_base = OTHER; note = 2'-fluoroadenosine-3'-phosphate
  modified_base 10: mod_base = OTHER; note = 2'-fluoroadenosine-3'-phosphate
  modified_base 11: mod_base = OTHER; note = 2'-fluorocytidine-3'-phosphate
  modified_base 12: mod_base = OTHER; note = 2'-O-methyladenosine-3'-phosphate
  modified_base 13: mod_base = OTHER; note = 2'-O-methylguanosine-3'-phosphate
  modified_base 14: mod_base = OTHER; note = 2'-O-methyladenosine-3'-phosphate
  modified_base 15: mod_base = OTHER; note = 2'-O-methyluridine-3'-phosphate
  modified_base 16: mod_base = OTHER; note = 2'-O-methyluridine-3'-phosphate
  modified_base 17: mod_base = OTHER; note = 2'-O-methylcytidine-3'-phosphate
  modified_base 18: mod_base = OTHER; note = 2'-O-methyladenosine-3'-phosphate
  modified_base 19: mod_base = OTHER; note = 2'-O-methyladenosine-3'-phosphate
  modified_base 20: mod_base = OTHER; note = 2'-O-methyladenosine-3'-phosphate
  modified_base 21: mod_base = OTHER; note = 2'-O-methylcytidine-3'-phosphate N-[tris(GalNAc-alkyl)-amidodecanoyl)]-4-hydroxyprolinol Hyp-(GalNAc-alkyl)3
atgtgcgtaacagattcaaac

SEQ ID NO: 2975 - RNA, 23 nt, synthetic construct
  source 1..23: mol_type = other RNA; note = Description of Artificial Sequence: Synthetic oligonucleotide
  modified_base 1: mod_base = OTHER; note = 2'-O-methylguanosine-3'-phosphorothioate
  modified_base 2: mod_base = OTHER; note = 2'-fluorouridine -3'-phosphorothioate
  modified_base 3: mod_base = OTHER; note = 2'-O-methyluridine-3'-phosphate
  modified_base 4: mod_base = OTHER; note = 2'-O-methyluridine-3'-phosphate
  modified_base 5: mod_base = OTHER; note = 2'-O-methylguanosine-3'-phosphate
  modified_base 6: mod_base = OTHER; note = 2'-fluoroadenosine-3'-phosphate
  modified_base 7: mod_base = OTHER; note = 2'-O-methyladenosine-3'-phosphate
  modified_base 8: mod_base = OTHER; note = 2'-fluorouridine-3'-phosphate
  modified_base 9: mod_base = OTHER; note = 2'-fluorocytidine-3'-phosphate
  modified_base 10: mod_base = OTHER; note = 2'-O-methyluridine-3'-phosphate
  modified_base 11: mod_base = OTHER; note = 2'-O-methylguanosine-3'-phosphate
  modified_base 12: mod_base = OTHER; note = 2'-O-methyluridine-3'-phosphate
  modified_base 13: mod_base = OTHER; note = 2'-O-methyluridine-3'-phosphate
  modified_base 14: mod_base = OTHER; note = 2'-fluoroadenosine-3'-phosphate
  modified_base 15: mod_base = OTHER; note = 2'-O-methylcytidine-3'-phosphate
  modified_base 16: mod_base = OTHER; note = 2'-fluoroguanosine-3'-phosphate
  modified_base 17: mod_base = OTHER; note = 2'-O-methylcytidine-3'-phosphate
  modified_base 18: mod_base = OTHER; note = 2'-O-methyladenosine-3'-phosphate
  modified_base 19: mod_base = OTHER; note = 2'-O-methylcytidine-3'-phosphate
  modified_base 20: mod_base = OTHER; note = 2'-O-methyladenosine-3'-phosphate
  modified_base 21: mod_base = OTHER; note = 2'-O-methyluridine-3'-phosphorothioate
  modified_base 22: mod_base = OTHER; note = 2'-O-methylcytidine-3'-phosphorothioate
  modified_base 23: mod_base = OTHER; note = 2'-O-methyladenosine-3'-phosphate
gtttgaatctgttacgcacatca

SEQ ID NO: 2976 - RNA, 21 nt, synthetic construct
  source 1..21: mol_type = other RNA; note = Description of Artificial Sequence: Synthetic oligonucleotide
  modified_base 1: mod_base = OTHER; note = 2'-O-methylguanosine-3'-phosphorothioate
  modified_base 2: mod_base = OTHER; note = 2'-O-methyladenosine-3'-phosphorothioate
  modified_base 3: mod_base = OTHER; note = 2'-O-methyluridine-3'-phosphate
  modified_base 4: mod_base = OTHER; note = 2'-O-methylguanosine-3'-phosphate
  modified_base 5: mod_base = OTHER; note = 2'-O-methyluridine-3'-phosphate
  modified_base 6: mod_base = OTHER; note = 2'-O-methylguanosine-3'-phosphate
  modified_base 7: mod_base = OTHER; note = 2'-fluorocytidine-3'-phosphate
  modified_base 8: mod_base = OTHER; note = 2'-O-methylguanosine-3'-phosphate
  modified_base 9: mod_base = OTHER; note = 2'-fluorouridine-3'-phosphate
  modified_base 10: mod_base = OTHER; note = 2'-fluoroadenosine-3'-phosphate
  modified_base 11: mod_base = OTHER; note = 2'-fluoroadenosine-3'-phosphate
  modified_base 12: mod_base = OTHER; note = 2'-O-methylcytidine-3'-phosphate
  modified_base 13: mod_base = OTHER; note = 2'-O-methyladenosine-3'-phosphate
  modified_base 14: mod_base = OTHER; note = 2'-O-methylguanosine-3'-phosphate
  modified_base 15: mod_base = OTHER; note = 2'-O-methyladenosine-3'-phosphate
  modified_base 16: mod_base = OTHER; note = 2'-O-methyluridine-3'-phosphate
  modified_base 17: mod_base = OTHER; note = 2'-O-methyluridine-3'-phosphate
  modified_base 18: mod_base = OTHER; note = 2'-O-methylcytidine-3'-phosphate
  modified_base 19: mod_base = OTHER; note = 2'-O-methyladenosine-3'-phosphate
  modified_base 20: mod_base = OTHER; note = 2'-O-methyladenosine-3'-phosphate
  modified_base 21: mod_base = OTHER; note = 2'-O-methyladenosine-3'-phosphate N-[tris(GalNAc-alkyl)-amidodecanoyl)]-4-hydroxyprolinol Hyp-(GalNAc-alkyl)3
gatgtgcgtaacagattcaaa

SEQ ID NO: 2977 - RNA, 23 nt, synthetic construct
  source 1..23: mol_type = other RNA; note = Description of Artificial Sequence: Synthetic oligonucleotide
  modified_base 1: mod_base = OTHER; note = 2'-O-methyluridine-3'-phosphorothioate
  modified_base 2: mod_base = OTHER; note = 2'-fluorouridine -3'-phosphorothioate
  modified_base 3: mod_base = OTHER; note = 2'-O-methyluridine-3'-phosphate
  modified_base 4: mod_base = OTHER; note = 2'-O-methylguanosine-3'-phosphate
  modified_base 5: mod_base = OTHER; note = 2'-O-methyladenosine-3'-phosphate
  modified_base 6: mod_base = OTHER; note = 2'-fluoroadenosine-3'-phosphate
  modified_base 7: mod_base = OTHER; note = 2'-O-methyluridine-3'-phosphate
  modified_base 8: mod_base = OTHER; note = 2'-fluorocytidine-3'-phosphate
  modified_base 9: mod_base = OTHER; note = 2'-fluorouridine-3'-phosphate
  modified_base 10: mod_base = OTHER; note = 2'-O-methylguanosine-3'-phosphate
  modified_base 11: mod_base = OTHER; note = 2'-O-methyluridine-3'-phosphate
  modified_base 12: mod_base = OTHER; note = 2'-O-methyluridine-3'-phosphate
  modified_base 13: mod_base = OTHER; note = 2'-O-methyladenosine-3'-phosphate
  modified_base 14: mod_base = OTHER; note = 2'-fluorocytidine-3'-phosphate
  modified_base 15: mod_base = OTHER; note = 2'-O-methylguanosine-3'-phosphate
  modified_base 16: mod_base = OTHER; note = 2'-fluorocytidine-3'-phosphate
  modified_base 17: mod_base = OTHER; note = 2'-O-methyladenosine-3'-phosphate
  modified_base 18: mod_base = OTHER; note = 2'-O-methylcytidine-3'-phosphate
  modified_base 19: mod_base = OTHER; note = 2'-O-methyladenosine-3'-phosphate
  modified_base 20: mod_base = OTHER; note = 2'-O-methyluridine-3'-phosphate
  modified_base 21: mod_base = OTHER; note = 2'-O-methylcytidine-3'-phosphorothioate
  modified_base 22: mod_base = OTHER; note = 2'-O-methyladenosine-3'-phosphorothioate
  modified_base 23: mod_base = OTHER; note = 2'-O-methyluridine-3'-phosphate
tttgaatctgttacgcacatcat

SEQ ID NO: 2978 - RNA, 21 nt, synthetic construct
  source 1..21: mol_type = other RNA; note = Description of Artificial Sequence: Synthetic oligonucleotide
  modified_base 1: mod_base = OTHER; note = 2'-O-methyladenosine-3'-phosphorothioate
  modified_base 2: mod_base = OTHER; note = 2'-O-methylguanosine-3'-phosphorothioate
  modified_base 3: mod_base = OTHER; note = 2'-O-methyladenosine-3'-phosphate
  modified_base 4: mod_base = OTHER; note = 2'-O-methylguanosine-3'-phosphate
  modified_base 5: mod_base = OTHER; note = 2'-O-methyladenosine-3'-phosphate
  modified_base 6: mod_base = OTHER; note = 2'-O-methyladenosine-3'-phosphate
  modified_base 7: mod_base = OTHER; note = 2'-fluoroguanosine-3'-phosphate
  modified_base 8: mod_base = OTHER; note = 2'-O-methyladenosine-3'-phosphate
  modified_base 9: mod_base = OTHER; note = 2'-fluorouridine-3'-phosphate
  modified_base 10: mod_base = OTHER; note = 2'-fluoroguanosine-3'-phosphate
  modified_base 11: mod_base = OTHER; note = 2'-fluoroguanosine-3'-phosphate
  modified_base 12: mod_base = OTHER; note = 2'-O-methylguanosine-3'-phosphate
  modified_base 13: mod_base = OTHER; note = 2'-O-methylcytidine-3'-phosphate
  modified_base 14: mod_base = OTHER; note = 2'-O-methyluridine-3'-phosphate
  modified_base 15: mod_base = OTHER; note = 2'-O-methyladenosine-3'-phosphate
  modified_base 16: mod_base = OTHER; note = 2'-O-methylcytidine-3'-phosphate
  modified_base 17: mod_base = OTHER; note = 2'-O-methyladenosine-3'-phosphate
  modified_base 18: mod_base = OTHER; note = 2'-O-methyladenosine-3'-phosphate
  modified_base 19: mod_base = OTHER; note = 2'-O-methylguanosine-3'-phosphate
  modified_base 20: mod_base = OTHER; note = 2'-O-methylguanosine-3'-phosphate
  modified_base 21: mod_base = OTHER; note = 2'-O-methylcytidine-3'-phosphate N-[tris(GalNAc-alkyl)-amidodecanoyl)]-4-hydroxyprolinol Hyp-(GalNAc-alkyl)3
agagaagatgggctacaaggc

SEQ ID NO: 2979 - RNA, 23 nt, synthetic construct
  source 1..23: mol_type = other RNA; note = Description of Artificial Sequence: Synthetic oligonucleotide
  modified_base 1: mod_base = OTHER; note = 2'-O-methylguanosine-3'-phosphorothioate
  modified_base 2: mod_base = OTHER; note = 2'-fluorocytidine-3'-phosphorothioate
  modified_base 3: mod_base = OTHER; note = 2'-O-methylcytidine-3'-phosphate
  modified_base 4: mod_base = OTHER; note = 2'-O-methyluridine-3'-phosphate
  modified_base 5: mod_base = OTHER; note = 2'-O-methyluridine-3'-phosphate
  modified_base 6: mod_base = OTHER; note = 2'-fluoroguanosine-3'-phosphate
  modified_base 7: mod_base = OTHER; note = 2'-O-methyluridine-3'-phosphate
  modified_base 8: mod_base = OTHER; note = 2'-fluoroadenosine-3'-phosphate
  modified_base 9: mod_base = OTHER; note = 2'-fluoroguanosine-3'-phosphate
  modified_base 10: mod_base = OTHER; note = 2'-O-methylcytidine-3'-phosphate
  modified_base 11: mod_base = OTHER; note = 2'-O-methylcytidine-3'-phosphate
  modified_base 12: mod_base = OTHER; note = 2'-O-methylcytidine-3'-phosphate
  modified_base 13: mod_base = OTHER; note = 2'-O-methyladenosine-3'-phosphate
  modified_base 14: mod_base = OTHER; note = 2'-fluorouridine-3'-phosphate
  modified_base 15: mod_base = OTHER; note = 2'-O-methylcytidine-3'-phosphate
  modified_base 16: mod_base = OTHER; note = 2'-fluorouridine-3'-phosphate
  modified_base 17: mod_base = OTHER; note = 2'-O-methyluridine-3'-phosphate
  modified_base 18: mod_base = OTHER; note = 2'-O-methylcytidine-3'-phosphate
  modified_base 19: mod_base = OTHER; note = 2'-O-methyluridine-3'-phosphate
  modified_base 20: mod_base = OTHER; note = 2'-O-methylcytidine-3'-phosphate
  modified_base 21: mod_base = OTHER; note = 2'-O-methyluridine-3'-phosphorothioate
  modified_base 22: mod_base = OTHER; note = 2'-O-methylguanosine-3'-phosphorothioate
  modified_base 23: mod_base = OTHER; note = 2'-O-methylcytidine-3'-phosphate
gccttgtagcccatcttctctgc

SEQ ID NO: 2980 - RNA, 21 nt, synthetic construct
  source 1..21: mol_type = other RNA; note = Description of Artificial Sequence: Synthetic oligonucleotide
  modified_base 1: mod_base = OTHER; note = 2'-O-methylguanosine-3'-phosphorothioate
  modified_base 2: mod_base = OTHER; note = 2'-O-methyladenosine-3'-phosphorothioate
  modified_base 3: mod_base = OTHER; note = 2'-O-methylguanosine-3'-phosphate
  modified_base 4: mod_base = OTHER; note = 2'-O-methyladenosine-3'-phosphate
  modified_base 5: mod_base = OTHER; note = 2'-O-methyladenosine-3'-phosphate
  modified_base 6: mod_base = OTHER; note = 2'-O-methylguanosine-3'-phosphate
  modified_base 7: mod_base = OTHER; note = 2'-fluoroadenosine-3'-phosphate
  modified_base 8: mod_base = OTHER; note = 2'-O-methyluridine-3'-phosphate
  modified_base 9: mod_base = OTHER; note = 2'-fluoroguanosine-3'-phosphate
  modified_base 10: mod_base = OTHER; note = 2'-fluoroguanosine-3'-phosphate
  modified_base 11: mod_base = OTHER; note = 2'-fluoroguanosine-3'-phosphate
  modified_base 12: mod_base = OTHER; note = 2'-O-methylcytidine-3'-phosphate
  modified_base 13: mod_base = OTHER; note = 2'-O-methyluridine-3'-phosphate
  modified_base 14: mod_base = OTHER; note = 2'-O-methyladenosine-3'-phosphate
  modified_base 15: mod_base = OTHER; note = 2'-O-methylcytidine-3'-phosphate
  modified_base 16: mod_base = OTHER; note = 2'-O-methyladenosine-3'-phosphate
  modified_base 17: mod_base = OTHER; note = 2'-O-methyladenosine-3'-phosphate
  modified_base 18: mod_base = OTHER; note = 2'-O-methylguanosine-3'-phosphate
  modified_base 19: mod_base = OTHER; note = 2'-O-methylguanosine-3'-phosphate
  modified_base 20: mod_base = OTHER; note = 2'-O-methylcytidine-3'-phosphate
  modified_base 21: mod_base = OTHER; note = 2'-O-methylcytidine-3'-phosphate N-[tris(GalNAc-alkyl)-amidodecanoyl)]-4-hydroxyprolinol Hyp-(GalNAc-alkyl)3
gagaagatgggctacaaggcc

SEQ ID NO: 2981 - RNA, 23 nt, synthetic construct
  source 1..23: mol_type = other RNA; note = Description of Artificial Sequence: Synthetic oligonucleotide
  modified_base 1: mod_base = OTHER; note = 2'-O-methylguanosine-3'-phosphorothioate
  modified_base 2: mod_base = OTHER; note = 2'-fluoroguanosine-3'-phosphorothioate
  modified_base 3: mod_base = OTHER; note = 2'-O-methylcytidine-3'-phosphate
  modified_base 4: mod_base = OTHER; note = 2'-O-methylcytidine-3'-phosphate
  modified_base 5: mod_base = OTHER; note = 2'-O-methyluridine-3'-phosphate
  modified_base 6: mod_base = OTHER; note = 2'-fluorouridine-3'-phosphate
  modified_base 7: mod_base = OTHER; note = 2'-O-methylguanosine-3'-phosphate
  modified_base 8: mod_base = OTHER; note = 2'-fluorouridine-3'-phosphate
  modified_base 9: mod_base = OTHER; note = 2'-fluoroadenosine-3'-phosphate
  modified_base 10: mod_base = OTHER; note = 2'-O-methylguanosine-3'-phosphate
  modified_base 11: mod_base = OTHER; note = 2'-O-methylcytidine-3'-phosphate
  modified_base 12: mod_base = OTHER; note = 2'-O-methylcytidine-3'-phosphate
  modified_base 13: mod_base = OTHER; note = 2'-O-methylcytidine-3'-phosphate
  modified_base 14: mod_base = OTHER; note = 2'-fluoroadenosine-3'-phosphate
  modified_base 15: mod_base = OTHER; note = 2'-O-methyluridine-3'-phosphate
  modified_base 16: mod_base = OTHER; note = 2'-fluorocytidine-3'-phosphate
  modified_base 17: mod_base = OTHER; note = 2'-O-methyluridine-3'-phosphate
  modified_base 18: mod_base = OTHER; note = 2'-O-methyluridine-3'-phosphate
  modified_base 19: mod_base = OTHER; note = 2'-O-methylcytidine-3'-phosphate
  modified_base 20: mod_base = OTHER; note = 2'-O-methyluridine-3'-phosphate
  modified_base 21: mod_base = OTHER; note = 2'-O-methylcytidine-3'-phosphorothioate
  modified_base 22: mod_base = OTHER; note = 2'-O-methyluridine-3'-phosphorothioate
  modified_base 23: mod_base = OTHER; note = 2'-O-methylguanosine-3'-phosphate
ggccttgtagcccatcttctctg

SEQ ID NO: 2982 - RNA, 21 nt, synthetic construct
  source 1..21: mol_type = other RNA; note = Description of Artificial Sequence: Synthetic oligonucleotide
  modified_base 1: mod_base = OTHER; note = 2'-O-methyladenosine-3'-phosphorothioate
  modified_base 2: mod_base = OTHER; note = 2'-O-methylguanosine-3'-phosphorothioate
  modified_base 3: mod_base = OTHER; note = 2'-O-methylguanosine-3'-phosphate
  modified_base 4: mod_base = OTHER; note = 2'-O-methylcytidine-3'-phosphate
  modified_base 5: mod_base = OTHER; note = 2'-O-methyladenosine-3'-phosphate
  modified_base 6: mod_base = OTHER; note = 2'-O-methylguanosine-3'-phosphate
  modified_base 7: mod_base = OTHER; note = 2'-fluoroadenosine-3'-phosphate
  modified_base 8: mod_base = OTHER; note = 2'-O-methylguanosine-3'-phosphate
  modified_base 9: mod_base = OTHER; note = 2'-fluoroadenosine-3'-phosphate
  modified_base 10: mod_base = OTHER; note = 2'-fluoroadenosine-3'-phosphate
  modified_base 11: mod_base = OTHER; note = 2'-fluoroguanosine-3'-phosphate
  modified_base 12: mod_base = OTHER; note = 2'-O-methyladenosine-3'-phosphate
  modified_base 13: mod_base = OTHER; note = 2'-O-methyluridine-3'-phosphate
  modified_base 14: mod_base = OTHER; note = 2'-O-methylguanosine-3'-phosphate
  modified_base 15: mod_base = OTHER; note = 2'-O-methylguanosine-3'-phosphate
  modified_base 16: mod_base = OTHER; note = 2'-O-methylguanosine-3'-phosphate
  modified_base 17: mod_base = OTHER; note = 2'-O-methylcytidine-3'-phosphate
  modified_base 18: mod_base = OTHER; note = 2'-O-methyluridine-3'-phosphate
  modified_base 19: mod_base = OTHER; note = 2'-O-methyladenosine-3'-phosphate
  modified_base 20: mod_base = OTHER; note = 2'-O-methylcytidine-3'-phosphate
  modified_base 21: mod_base = OTHER; note = 2'-O-methyladenosine-3'-phosphate N-[tris(GalNAc-alkyl)-amidodecanoyl)]-4-hydroxyprolinol Hyp-(GalNAc-alkyl)3
aggcagagaagatgggctaca

SEQ ID NO: 2983 - RNA, 23 nt, synthetic construct
  source 1..23: mol_type = other RNA; note = Description of Artificial Sequence: Synthetic oligonucleotide
  modified_base 1: mod_base = OTHER; note = 2'-O-methyluridine-3'-phosphorothioate
  modified_base 2: mod_base = OTHER; note = 2'-fluoroguanosine-3'-phosphorothioate
  modified_base 3: mod_base = OTHER; note = 2'-O-methyluridine-3'-phosphate
  modified_base 4: mod_base = OTHER; note = 2'-O-methyladenosine-3'-phosphate
  modified_base 5: mod_base = OTHER; note = 2'-O-methylguanosine-3'-phosphate
  modified_base 6: mod_base = OTHER; note = 2'-fluorocytidine-3'-phosphate
  modified_base 7: mod_base = OTHER; note = 2'-O-methylcytidine-3'-phosphate
  modified_base 8: mod_base = OTHER; note = 2'-fluorocytidine-3'-phosphate
  modified_base 9: mod_base = OTHER; note = 2'-fluoroadenosine-3'-phosphate
  modified_base 10: mod_base = OTHER; note = 2'-O-methyluridine-3'-phosphate
  modified_base 11: mod_base = OTHER; note = 2'-O-methylcytidine-3'-phosphate
  modified_base 12: mod_base = OTHER; note = 2'-O-methyluridine-3'-phosphate
  modified_base 13: mod_base = OTHER; note = 2'-O-methyluridine-3'-phosphate
  modified_base 14: mod_base = OTHER; note = 2'-fluorocytidine-3'-phosphate
  modified_base 15: mod_base = OTHER; note = 2'-O-methyluridine-3'-phosphate
  modified_base 16: mod_base = OTHER; note = 2'-fluorocytidine-3'-phosphate
  modified_base 17: mod_base = OTHER; note = 2'-O-methyluridine-3'-phosphate
  modified_base 18: mod_base = OTHER; note = 2'-O-methylguanosine-3'-phosphate
  modified_base 19: mod_base = OTHER; note = 2'-O-methylcytidine-3'-phosphate
  modified_base 20: mod_base = OTHER; note = 2'-O-methylcytidine-3'-phosphate
  modified_base 21: mod_base = OTHER; note = 2'-O-methyluridine-3'-phosphorothioate
  modified_base 22: mod_base = OTHER; note = 2'-O-methylguanosine-3'-phosphorothioate
  modified_base 23: mod_base = OTHER; note = 2'-O-methylcytidine-3'-phosphate
tgtagcccatcttctctgcctgc

SEQ ID NO: 2984 - RNA, 21 nt, synthetic construct
  source 1..21: mol_type = other RNA; note = Description of Artificial Sequence: Synthetic oligonucleotide
  modified_base 1: mod_base = OTHER; note = 2'-O-methylcytidine-3'-phosphorothioate
  modified_base 2: mod_base = OTHER; note = 2'-O-methyladenosine-3'-phosphorothioate
  modified_base 3: mod_base = OTHER; note = 2'-O-methylguanosine-3'-phosphate
  modified_base 4: mod_base = OTHER; note = 2'-O-methylguanosine-3'-phosphate
  modified_base 5: mod_base = OTHER; note = 2'-O-methylcytidine-3'-phosphate
  modified_base 6: mod_base = OTHER; note = 2'-O-methyladenosine-3'-phosphate
  modified_base 7: mod_base = OTHER; note = 2'-fluoroguanosine-3'-phosphate
  modified_base 8: mod_base = OTHER; note = 2'-O-methyladenosine-3'-phosphate
  modified_base 9: mod_base = OTHER; note = 2'-fluoroguanosine-3'-phosphate
  modified_base 10: mod_base = OTHER; note = 2'-fluoroadenosine-3'-phosphate
  modified_base 11: mod_base = OTHER; note = 2'-fluoroadenosine-3'-phosphate
  modified_base 12: mod_base = OTHER; note = 2'-O-methylguanosine-3'-phosphate
  modified_base 13: mod_base = OTHER; note = 2'-O-methyladenosine-3'-phosphate
  modified_base 14: mod_base = OTHER; note = 2'-O-methyluridine-3'-phosphate
  modified_base 15: mod_base = OTHER; note = 2'-O-methylguanosine-3'-phosphate
  modified_base 16: mod_base = OTHER; note = 2'-O-methylguanosine-3'-phosphate
  modified_base 17: mod_base = OTHER; note = 2'-O-methylguanosine-3'-phosphate
  modified_base 18: mod_base = OTHER; note = 2'-O-methylcytidine-3'-phosphate
  modified_base 19: mod_base = OTHER; note = 2'-O-methyluridine-3'-phosphate
  modified_base 20: mod_base = OTHER; note = 2'-O-methyladenosine-3'-phosphate
  modified_base 21: mod_base = OTHER; note = 2'-O-methylcytidine-3'-phosphate N-[tris(GalNAc-alkyl)-amidodecanoyl)]-4-hydroxyprolinol Hyp-(GalNAc-alkyl)3
caggcagagaagatgggctac

SEQ ID NO: 2985 - RNA, 23 nt, synthetic construct
  source 1..23: mol_type = other RNA; note = Description of Artificial Sequence: Synthetic oligonucleotide
  modified_base 1: mod_base = OTHER; note = 2'-O-methylguanosine-3'-phosphorothioate
  modified_base 2: mod_base = OTHER; note = 2'-fluorouridine -3'-phosphorothioate
  modified_base 3: mod_base = OTHER; note = 2'-O-methyladenosine-3'-phosphate
  modified_base 4: mod_base = OTHER; note = 2'-O-methylguanosine-3'-phosphate
  modified_base 5: mod_base = OTHER; note = 2'-O-methylcytidine-3'-phosphate
  modified_base 6: mod_base = OTHER; note = 2'-fluorocytidine-3'-phosphate
  modified_base 7: mod_base = OTHER; note = 2'-O-methylcytidine-3'-phosphate
  modified_base 8: mod_base = OTHER; note = 2'-fluoroadenosine-3'-phosphate
  modified_base 9: mod_base = OTHER; note = 2'-fluorouridine-3'-phosphate
  modified_base 10: mod_base = OTHER; note = 2'-O-methylcytidine-3'-phosphate
  modified_base 11: mod_base = OTHER; note = 2'-O-methyluridine-3'-phosphate
  modified_base 12: mod_base = OTHER; note = 2'-O-methyluridine-3'-phosphate
  modified_base 13: mod_base = OTHER; note = 2'-O-methylcytidine-3'-phosphate
  modified_base 14: mod_base = OTHER; note = 2'-fluorouridine-3'-phosphate
  modified_base 15: mod_base = OTHER; note = 2'-O-methylcytidine-3'-phosphate
  modified_base 16: mod_base = OTHER; note = 2'-fluorouridine-3'-phosphate
  modified_base 17: mod_base = OTHER; note = 2'-O-methylguanosine-3'-phosphate
  modified_base 18: mod_base = OTHER; note = 2'-O-methylcytidine-3'-phosphate
  modified_base 19: mod_base = OTHER; note = 2'-O-methylcytidine-3'-phosphate
  modified_base 20: mod_base = OTHER; note = 2'-O-methyluridine-3'-phosphate
  modified_base 21: mod_base = OTHER; note = 2'-O-methylguanosine-3'-phosphorothioate
  modified_base 22: mod_base = OTHER; note = 2'-O-methylcytidine-3'-phosphorothioate
  modified_base 23: mod_base = OTHER; note = 2'-O-methylcytidine-3'-phosphate
gtagcccatcttctctgcctgcc

SEQ ID NO: 2986-3209 - skipped (224 entries)

SEQ ID NO: 3210 - RNA, 21 nt, synthetic construct
  source 1..21: mol_type = other RNA; note = Description of Artificial Sequence: Synthetic oligonucleotide
tttatctgatctgtgattaaa

SEQ ID NO: 3211 - RNA, 21 nt, synthetic construct
  source 1..21: mol_type = other RNA; note = Description of Artificial Sequence: Synthetic oligonucleotide
actggttagtgtgaaatagtt

SEQ ID NO: 3212 - RNA, 21 nt, synthetic construct
  source 1..21: mol_type = other RNA; note = Description of Artificial Sequence: Synthetic oligonucleotide
aacatgcctagtccaacattt

SEQ ID NO: 3213 - RNA, 21 nt, synthetic construct
  source 1..21: mol_type = other RNA; note = Description of Artificial Sequence: Synthetic oligonucleotide
caagtccaatatggcaactct

SEQ ID NO: 3214 - RNA, 21 nt, synthetic construct
  source 1..21: mol_type = other RNA; note = Description of Artificial Sequence: Synthetic oligonucleotide
tccaccatgattaagggtctt

SEQ ID NO: 3215 - RNA, 21 nt, synthetic construct
  source 1..21: mol_type = other RNA; note = Description of Artificial Sequence: Synthetic oligonucleotide
tcatttcactgtctaggctaa

SEQ ID NO: 3216 - RNA, 21 nt, synthetic construct
  source 1..21: mol_type = other RNA; note = Description of Artificial Sequence: Synthetic oligonucleotide
tgtcctttttatctgatctgt

SEQ ID NO: 3217 - RNA, 21 nt, synthetic construct
  source 1..21: mol_type = other RNA; note = Description of Artificial Sequence: Synthetic oligonucleotide
ccagtgtataaatccaatata

SEQ ID NO: 3218 - RNA, 21 nt, synthetic construct
  source 1..21: mol_type = other RNA; note = Description of Artificial Sequence: Synthetic oligonucleotide
tccaagtgttataccaactaa

SEQ ID NO: 3219 - RNA, 21 nt, synthetic construct
  source 1..21: mol_type = other RNA; note = Description of Artificial Sequence: Synthetic oligonucleotide
gtcatcgaagacaaattgaaa

SEQ ID NO: 3220 - RNA, 21 nt, synthetic construct
  source 1..21: mol_type = other RNA; note = Description of Artificial Sequence: Synthetic oligonucleotide
gaacaccaaagattgtctcta

SEQ ID NO: 3221 - RNA, 21 nt, synthetic construct
  source 1..21: mol_type = other RNA; note = Description of Artificial Sequence: Synthetic oligonucleotide
aacaccaaagattgtctctga

SEQ ID NO: 3222 - RNA, 21 nt, synthetic construct
  source 1..21: mol_type = other RNA; note = Description of Artificial Sequence: Synthetic oligonucleotide
atgttgtcctttttatctgat

SEQ ID NO: 3223 - RNA, 21 nt, synthetic construct
  source 1..21: mol_type = other RNA; note = Description of Artificial Sequence: Synthetic oligonucleotide
tcaactcctgaagttagaaat

SEQ ID NO: 3224 - RNA, 21 nt, synthetic construct
  source 1..21: mol_type = other RNA; note = Description of Artificial Sequence: Synthetic oligonucleotide
aactatccaagtgttatacca

SEQ ID NO: 3225 - RNA, 21 nt, synthetic construct
  source 1..21: mol_type = other RNA; note = Description of Artificial Sequence: Synthetic oligonucleotide
tccttagaacaccaaagatta

SEQ ID NO: 3226 - RNA, 21 nt, synthetic construct
  source 1..21: mol_type = other RNA; note = Description of Artificial Sequence: Synthetic oligonucleotide
ggtattaatcttgtgtagtct

SEQ ID NO: 3227 - RNA, 21 nt, synthetic construct
  source 1..21: mol_type = other RNA; note = Description of Artificial Sequence: Synthetic oligonucleotide
ggctccttcactgaacatgca

SEQ ID NO: 3228 - RNA, 21 nt, synthetic construct
  source 1..21: mol_type = other RNA; note = Description of Artificial Sequence: Synthetic oligonucleotide
tatcagtagtgtacattacca

SEQ ID NO: 3229 - RNA, 21 nt, synthetic construct
  source 1..21: mol_type = other RNA; note = Description of Artificial Sequence: Synthetic oligonucleotide
cagccttttccttagaacaca

SEQ ID NO: 3230 - RNA, 21 nt, synthetic construct
  source 1..21: mol_type = other RNA; note = Description of Artificial Sequence: Synthetic oligonucleotide
ctggttagtgtgaaatagtta

SEQ ID NO: 3231 - RNA, 21 nt, synthetic construct
  source 1..21: mol_type = other RNA; note = Description of Artificial Sequence: Synthetic oligonucleotide
actatatcagtagtgtacatt

SEQ ID NO: 3232 - RNA, 21 nt, synthetic construct
  source 1..21: mol_type = other RNA; note = Description of Artificial Sequence: Synthetic oligonucleotide
tatatcagtagtgtacattaa

SEQ ID NO: 3233 - RNA, 21 nt, synthetic construct
  source 1..21: mol_type = other RNA; note = Description of Artificial Sequence: Synthetic oligonucleotide
gtaatattttaagatggacta

SEQ ID NO: 3234 - RNA, 21 nt, synthetic construct
  source 1..21: mol_type = other RNA; note = Description of Artificial Sequence: Synthetic oligonucleotide
ttttaagatggactgggaaaa

SEQ ID NO: 3235 - RNA, 21 nt, synthetic construct
  source 1..21: mol_type = other RNA; note = Description of Artificial Sequence: Synthetic oligonucleotide
tggttagtgtgaaatagttct

SEQ ID NO: 3236 - RNA, 21 nt, synthetic construct
  source 1..21: mol_type = other RNA; note = Description of Artificial Sequence: Synthetic oligonucleotide
ttcactgaacatgcctagtca

SEQ ID NO: 3237 - RNA, 21 nt, synthetic construct
  source 1..21: mol_type = other RNA; note = Description of Artificial Sequence: Synthetic oligonucleotide
accaactatccaagtgttata

SEQ ID NO: 3238 - RNA, 21 nt, synthetic construct
  source 1..21: mol_type = other RNA; note = Description of Artificial Sequence: Synthetic oligonucleotide
ccaagtgttataccaactaaa

SEQ ID NO: 3239 - RNA, 21 nt, synthetic construct
  source 1..21: mol_type = other RNA; note = Description of Artificial Sequence: Synthetic oligonucleotide
ttccttttggttccaagtcca

SEQ ID NO: 3240 - RNA, 21 nt, synthetic construct
  source 1..21: mol_type = other RNA; note = Description of Artificial Sequence: Synthetic oligonucleotide
gcagccttttccttagaacaa

SEQ ID NO: 3241 - RNA, 21 nt, synthetic construct
  source 1..21: mol_type = other RNA; note = Description of Artificial Sequence: Synthetic oligonucleotide
agtaatattttaagatggact

SEQ ID NO: 3242 - RNA, 21 nt, synthetic construct
  source 1..21: mol_type = other RNA; note = Description of Artificial Sequence: Synthetic oligonucleotide
aaaatccacagctatatccta

SEQ ID NO: 3243 - RNA, 21 nt, synthetic construct
  source 1..21: mol_type = other RNA; note = Description of Artificial Sequence: Synthetic oligonucleotide
tccttcactgaacatgcctaa

SEQ ID NO: 3244 - RNA, 21 nt, synthetic construct
  source 1..21: mol_type = other RNA; note = Description of Artificial Sequence: Synthetic oligonucleotide
cactgaacatgcctagtccaa

SEQ ID NO: 3245 - RNA, 21 nt, synthetic construct
  source 1..21: mol_type = other RNA; note = Description of Artificial Sequence: Synthetic oligonucleotide
aagtgttataccaactaaaac

SEQ ID NO: 3246 - RNA, 21 nt, synthetic construct
  source 1..21: mol_type = other RNA; note = Description of Artificial Sequence: Synthetic oligonucleotide
ttccaccatgattaagggtct

SEQ ID NO: 3247 - RNA, 21 nt, synthetic construct
  source 1..21: mol_type = other RNA; note = Description of Artificial Sequence: Synthetic oligonucleotide
gaacatgcctagtccaacatt

SEQ ID NO: 3248 - RNA, 21 nt, synthetic construct
  source 1..21: mol_type = other RNA; note = Description of Artificial Sequence: Synthetic oligonucleotide
atcagtagtgtacattaccat

SEQ ID NO: 3249 - RNA, 21 nt, synthetic construct
  source 1..21: mol_type = other RNA; note = Description of Artificial Sequence: Synthetic oligonucleotide
atccaagtgttataccaacta

SEQ ID NO: 3250 - RNA, 21 nt, synthetic construct
  source 1..21: mol_type = other RNA; note = Description of Artificial Sequence: Synthetic oligonucleotide
ccaagtccaatatggcaacta

SEQ ID NO: 3251 - RNA, 21 nt, synthetic construct
  source 1..21: mol_type = other RNA; note = Description of Artificial Sequence: Synthetic oligonucleotide
atctcagaccttgtgaaggta

SEQ ID NO: 3252 - RNA, 21 nt, synthetic construct
  source 1..21: mol_type = other RNA; note = Description of Artificial Sequence: Synthetic oligonucleotide
catttcactgtctaggctaca

SEQ ID NO: 3253 - RNA, 21 nt, synthetic construct
  source 1..21: mol_type = other RNA; note = Description of Artificial Sequence: Synthetic oligonucleotide
ccacagctatatcctgatgct

SEQ ID NO: 3254 - RNA, 21 nt, synthetic construct
  source 1..21: mol_type = other RNA; note = Description of Artificial Sequence: Synthetic oligonucleotide
cttcactgaacatgcctagta

SEQ ID NO: 3255 - RNA, 21 nt, synthetic construct
  source 1..21: mol_type = other RNA; note = Description of Artificial Sequence: Synthetic oligonucleotide
gtggttgagagtgcttatgaa

SEQ ID NO: 3256 - RNA, 21 nt, synthetic construct
  source 1..21: mol_type = other RNA; note = Description of Artificial Sequence: Synthetic oligonucleotide
caaactcaaaggctacacata

SEQ ID NO: 3257 - RNA, 21 nt, synthetic construct
  source 1..21: mol_type = other RNA; note = Description of Artificial Sequence: Synthetic oligonucleotide
atatcagtagtgtacattaca

SEQ ID NO: 3258 - RNA, 21 nt, synthetic construct
  source 1..21: mol_type = other RNA; note = Description of Artificial Sequence: Synthetic oligonucleotide
caaccaactatccaagtgtta

SEQ ID NO: 3259 - RNA, 21 nt, synthetic construct
  source 1..21: mol_type = other RNA; note = Description of Artificial Sequence: Synthetic oligonucleotide
tcatcgaagacaaattgaaga

SEQ ID NO: 3260 - RNA, 21 nt, synthetic construct
  source 1..21: mol_type = other RNA; note = Description of Artificial Sequence: Synthetic oligonucleotide
gcagatttggcagagagtata

SEQ ID NO: 3261 - RNA, 21 nt, synthetic construct
  source 1..21: mol_type = other RNA; note = Description of Artificial Sequence: Synthetic oligonucleotide
ctccttcactgaacatgccta

SEQ ID NO: 3262 - RNA, 21 nt, synthetic construct
  source 1..21: mol_type = other RNA; note = Description of Artificial Sequence: Synthetic oligonucleotide
catgcctagtccaacattttt

SEQ ID NO: 3263 - RNA, 21 nt, synthetic construct
  source 1..21: mol_type = other RNA; note = Description of Artificial Sequence: Synthetic oligonucleotide
tgccatcagtatcttaatgaa

SEQ ID NO: 3264 - RNA, 21 nt, synthetic construct
  source 1..21: mol_type = other RNA; note = Description of Artificial Sequence: Synthetic oligonucleotide
gccatcagtatcttaatgaaa

SEQ ID NO: 3265 - RNA, 21 nt, synthetic construct
  source 1..21: mol_type = other RNA; note = Description of Artificial Sequence: Synthetic oligonucleotide
ttagaacaccaaagattgtct

SEQ ID NO: 3266 - RNA, 21 nt, synthetic construct
  source 1..21: mol_type = other RNA; note = Description of Artificial Sequence: Synthetic oligonucleotide
atcatttcactgtctaggcta

SEQ ID NO: 3267 - RNA, 21 nt, synthetic construct
  source 1..21: mol_type = other RNA; note = Description of Artificial Sequence: Synthetic oligonucleotide
tcactgtctaggctacaacaa

SEQ ID NO: 3268 - RNA, 21 nt, synthetic construct
  source 1..21: mol_type = other RNA; note = Description of Artificial Sequence: Synthetic oligonucleotide
ggatccagtgtataaatccaa

SEQ ID NO: 3269 - RNA, 21 nt, synthetic construct
  source 1..21: mol_type = other RNA; note = Description of Artificial Sequence: Synthetic oligonucleotide
caactatccaagtgttataca

SEQ ID NO: 3270 - RNA, 21 nt, synthetic construct
  source 1..21: mol_type = other RNA; note = Description of Artificial Sequence: Synthetic oligonucleotide
ttggttccaagtccaatatga

SEQ ID NO: 3271 - RNA, 21 nt, synthetic construct
  source 1..21: mol_type = other RNA; note = Description of Artificial Sequence: Synthetic oligonucleotide
tgcttatgaggtgatcaaact

SEQ ID NO: 3272 - RNA, 21 nt, synthetic construct
  source 1..21: mol_type = other RNA; note = Description of Artificial Sequence: Synthetic oligonucleotide
aaactcaaaggctacacatca

SEQ ID NO: 3273 - RNA, 21 nt, synthetic construct
  source 1..21: mol_type = other RNA; note = Description of Artificial Sequence: Synthetic oligonucleotide
tctcagaccttgtgaaggtga

SEQ ID NO: 3274 - RNA, 21 nt, synthetic construct
  source 1..21: mol_type = other RNA; note = Description of Artificial Sequence: Synthetic oligonucleotide
taaaatccacagctatatcct

SEQ ID NO: 3275 - RNA, 21 nt, synthetic construct
  source 1..21: mol_type = other RNA; note = Description of Artificial Sequence: Synthetic oligonucleotide
ccttcactgaacatgcctagt

SEQ ID NO: 3276 - RNA, 21 nt, synthetic construct
  source 1..21: mol_type = other RNA; note = Description of Artificial Sequence: Synthetic oligonucleotide
gggatccagtgtataaatcca

SEQ ID NO: 3277 - RNA, 21 nt, synthetic construct
  source 1..21: mol_type = other RNA; note = Description of Artificial Sequence: Synthetic oligonucleotide
caataaaccttgaacagtgaa

SEQ ID NO: 3278 - RNA, 21 nt, synthetic construct
  source 1..21: mol_type = other RNA; note = Description of Artificial Sequence: Synthetic oligonucleotide
ggcctgtgccatcagtatctt

SEQ ID NO: 3279 - RNA, 21 nt, synthetic construct
  source 1..21: mol_type = other RNA; note = Description of Artificial Sequence: Synthetic oligonucleotide
ttgttgatgtcatcgaagaca

SEQ ID NO: 3280 - RNA, 21 nt, synthetic construct
  source 1..21: mol_type = other RNA; note = Description of Artificial Sequence: Synthetic oligonucleotide
ggatcttattttgtgaactat

SEQ ID NO: 3281 - RNA, 21 nt, synthetic construct
  source 1..21: mol_type = other RNA; note = Description of Artificial Sequence: Synthetic oligonucleotide
aaggatcttattttgtgaact

SEQ ID NO: 3282 - RNA, 21 nt, synthetic construct
  source 1..21: mol_type = other RNA; note = Description of Artificial Sequence: Synthetic oligonucleotide
atcatgtcttgtgcataatta

SEQ ID NO: 3283 - RNA, 21 nt, synthetic construct
  source 1..21: mol_type = other RNA; note = Description of Artificial Sequence: Synthetic oligonucleotide
tgtcatatcatttcactgtct

SEQ ID NO: 3284 - RNA, 21 nt, synthetic construct
  source 1..21: mol_type = other RNA; note = Description of Artificial Sequence: Synthetic oligonucleotide
tcatatcatttcactgtctaa

SEQ ID NO: 3285 - RNA, 21 nt, synthetic construct
  source 1..21: mol_type = other RNA; note = Description of Artificial Sequence: Synthetic oligonucleotide
atttataatcttctaaaggaa

SEQ ID NO: 3286 - RNA, 21 nt, synthetic construct
  source 1..21: mol_type = other RNA; note = Description of Artificial Sequence: Synthetic oligonucleotide
tggtttgtaaaatccacagct

SEQ ID NO: 3287 - RNA, 21 nt, synthetic construct
  source 1..21: mol_type = other RNA; note = Description of Artificial Sequence: Synthetic oligonucleotide
atgctggatggtattaatctt

SEQ ID NO: 3288 - RNA, 21 nt, synthetic construct
  source 1..21: mol_type = other RNA; note = Description of Artificial Sequence: Synthetic oligonucleotide
aactatatcagtagtgtacat

SEQ ID NO: 3289 - RNA, 21 nt, synthetic construct
  source 1..21: mol_type = other RNA; note = Description of Artificial Sequence: Synthetic oligonucleotide
atcaactcctgaagttagaaa

SEQ ID NO: 3290 - RNA, 21 nt, synthetic construct
  source 1..21: mol_type = other RNA; note = Description of Artificial Sequence: Synthetic oligonucleotide
ctggatggtattaatcttgta

SEQ ID NO: 3291 - RNA, 21 nt, synthetic construct
  source 1..21: mol_type = other RNA; note = Description of Artificial Sequence: Synthetic oligonucleotide
tatcatttcactgtctaggct

SEQ ID NO: 3292 - RNA, 21 nt, synthetic construct
  source 1..21: mol_type = other RNA; note = Description of Artificial Sequence: Synthetic oligonucleotide
gtaaaatccacagctatatca

SEQ ID NO: 3293 - RNA, 21 nt, synthetic construct
  source 1..21: mol_type = other RNA; note = Description of Artificial Sequence: Synthetic oligonucleotide
tccttagtgttccttgcattt

SEQ ID NO: 3294 - RNA, 21 nt, synthetic construct
  source 1..21: mol_type = other RNA; note = Description of Artificial Sequence: Synthetic oligonucleotide
catatcatttcactgtctaga

SEQ ID NO: 3295 - RNA, 21 nt, synthetic construct
  source 1..21: mol_type = other RNA; note = Description of Artificial Sequence: Synthetic oligonucleotide
aacatcaactcctgaagttaa

SEQ ID NO: 3296 - RNA, 21 nt, synthetic construct
  source 1..21: mol_type = other RNA; note = Description of Artificial Sequence: Synthetic oligonucleotide
cctgatgctggatggtattaa

SEQ ID NO: 3297 - RNA, 21 nt, synthetic construct
  source 1..21: mol_type = other RNA; note = Description of Artificial Sequence: Synthetic oligonucleotide
aatgcaaccaactatccaagt

SEQ ID NO: 3298 - RNA, 21 nt, synthetic construct
  source 1..21: mol_type = other RNA; note = Description of Artificial Sequence: Synthetic oligonucleotide
tttacggaataaaggatgata

SEQ ID NO: 3299 - RNA, 21 nt, synthetic construct
  source 1..21: mol_type = other RNA; note = Description of Artificial Sequence: Synthetic oligonucleotide
ttccttagtgttccttgcatt

SEQ ID NO: 3300 - RNA, 21 nt, synthetic construct
  source 1..21: mol_type = other RNA; note = Description of Artificial Sequence: Synthetic oligonucleotide
caatgcaaccaactatccaaa

SEQ ID NO: 3301 - RNA, 21 nt, synthetic construct
  source 1..21: mol_type = other RNA; note = Description of Artificial Sequence: Synthetic oligonucleotide
agatttggcagagagtataat

SEQ ID NO: 3302 - RNA, 21 nt, synthetic construct
  source 1..21: mol_type = other RNA; note = Description of Artificial Sequence: Synthetic oligonucleotide
tttccaccatgattaagggta

SEQ ID NO: 3303 - RNA, 21 nt, synthetic construct
  source 1..21: mol_type = other RNA; note = Description of Artificial Sequence: Synthetic oligonucleotide
actggttagtgtgaaatagtt

SEQ ID NO: 3304 - RNA, 21 nt, synthetic construct
  source 1..21: mol_type = other RNA; note = Description of Artificial Sequence: Synthetic oligonucleotide
caagtccaatatggcaactct

SEQ ID NO: 3305 - RNA, 21 nt, synthetic construct
  source 1..21: mol_type = other RNA; note = Description of Artificial Sequence: Synthetic oligonucleotide
tccaccatgattaagggtctt

SEQ ID NO: 3306 - RNA, 21 nt, synthetic construct
  source 1..21: mol_type = other RNA; note = Description of Artificial Sequence: Synthetic oligonucleotide
tcatttcactgtctaggctaa

SEQ ID NO: 3307 - RNA, 21 nt, synthetic construct
  source 1..21: mol_type = other RNA; note = Description of Artificial Sequence: Synthetic oligonucleotide
tgtcctttttatctgatctgt

SEQ ID NO: 3308 - RNA, 21 nt, synthetic construct
  source 1..21: mol_type = other RNA; note = Description of Artificial Sequence: Synthetic oligonucleotide
ccagtgtataaatccaatata

SEQ ID NO: 3309 - RNA, 21 nt, synthetic construct
  source 1..21: mol_type = other RNA; note = Description of Artificial Sequence: Synthetic oligonucleotide
tccaagtgttataccaactaa

SEQ ID NO: 3310 - RNA, 21 nt, synthetic construct
  source 1..21: mol_type = other RNA; note = Description of Artificial Sequence: Synthetic oligonucleotide
gaacaccaaagattgtctcta

SEQ ID NO: 3311 - RNA, 21 nt, synthetic construct
  source 1..21: mol_type = other RNA; note = Description of Artificial Sequence: Synthetic oligonucleotide
aacaccaaagattgtctctga

SEQ ID NO: 3312 - RNA, 21 nt, synthetic construct
  source 1..21: mol_type = other RNA; note = Description of Artificial Sequence: Synthetic oligonucleotide
atgttgtcctttttatctgat

SEQ ID NO: 3313 - RNA, 21 nt, synthetic construct
  source 1..21: mol_type = other RNA; note = Description of Artificial Sequence: Synthetic oligonucleotide
tcaactcctgaagttagaaat

SEQ ID NO: 3314 - RNA, 21 nt, synthetic construct
  source 1..21: mol_type = other RNA; note = Description of Artificial Sequence: Synthetic oligonucleotide
aactatccaagtgttatacca

SEQ ID NO: 3315 - RNA, 21 nt, synthetic construct
  source 1..21: mol_type = other RNA; note = Description of Artificial Sequence: Synthetic oligonucleotide
ggtattaatcttgtgtagtct

SEQ ID NO: 3316 - RNA, 21 nt, synthetic construct
  source 1..21: mol_type = other RNA; note = Description of Artificial Sequence: Synthetic oligonucleotide
ggctccttcactgaacatgca

SEQ ID NO: 3317 - RNA, 21 nt, synthetic construct
  source 1..21: mol_type = other RNA; note = Description of Artificial Sequence: Synthetic oligonucleotide
tatcagtagtgtacattacca

SEQ ID NO: 3318 - RNA, 21 nt, synthetic construct
  source 1..21: mol_type = other RNA; note = Description of Artificial Sequence: Synthetic oligonucleotide
cagccttttccttagaacaca

SEQ ID NO: 3319 - RNA, 21 nt, synthetic construct
  source 1..21: mol_type = other RNA; note = Description of Artificial Sequence: Synthetic oligonucleotide
ctggttagtgtgaaatagtta

SEQ ID NO: 3320 - RNA, 21 nt, synthetic construct
  source 1..21: mol_type = other RNA; note = Description of Artificial Sequence: Synthetic oligonucleotide
actatatcagtagtgtacatt

SEQ ID NO: 3321 - RNA, 21 nt, synthetic construct
  source 1..21: mol_type = other RNA; note = Description of Artificial Sequence: Synthetic oligonucleotide
tatatcagtagtgtacattaa

SEQ ID NO: 3322 - RNA, 21 nt, synthetic construct
  source 1..21: mol_type = other RNA; note = Description of Artificial Sequence: Synthetic oligonucleotide
gtaatattttaagatggacta

SEQ ID NO: 3323 - RNA, 21 nt, synthetic construct
  source 1..21: mol_type = other RNA; note = Description of Artificial Sequence: Synthetic oligonucleotide
ttttaagatggactgggaaaa

SEQ ID NO: 3324 - RNA, 21 nt, synthetic construct
  source 1..21: mol_type = other RNA; note = Description of Artificial Sequence: Synthetic oligonucleotide
ttcactgaacatgcctagtca

SEQ ID NO: 3325 - RNA, 21 nt, synthetic construct
  source 1..21: mol_type = other RNA; note = Description of Artificial Sequence: Synthetic oligonucleotide
accaactatccaagtgttata

SEQ ID NO: 3326 - RNA, 21 nt, synthetic construct
  source 1..21: mol_type = other RNA; note = Description of Artificial Sequence: Synthetic oligonucleotide
ccaagtgttataccaactaaa

SEQ ID NO: 3327 - RNA, 21 nt, synthetic construct
  source 1..21: mol_type = other RNA; note = Description of Artificial Sequence: Synthetic oligonucleotide
agtaatattttaagatggact

SEQ ID NO: 3328 - RNA, 21 nt, synthetic construct
  source 1..21: mol_type = other RNA; note = Description of Artificial Sequence: Synthetic oligonucleotide
aaaatccacagctatatccta

SEQ ID NO: 3329 - RNA, 21 nt, synthetic construct
  source 1..21: mol_type = other RNA; note = Description of Artificial Sequence: Synthetic oligonucleotide
tccttcactgaacatgcctaa

SEQ ID NO: 3330 - RNA, 21 nt, synthetic construct
  source 1..21: mol_type = other RNA; note = Description of Artificial Sequence: Synthetic oligonucleotide
cactgaacatgcctagtccaa

SEQ ID NO: 3331 - RNA, 21 nt, synthetic construct
  source 1..21: mol_type = other RNA; note = Description of Artificial Sequence: Synthetic oligonucleotide
aagtgttataccaactaaaac

SEQ ID NO: 3332 - RNA, 21 nt, synthetic construct
  source 1..21: mol_type = other RNA; note = Description of Artificial Sequence: Synthetic oligonucleotide
ttccaccatgattaagggtct

SEQ ID NO: 3333 - RNA, 21 nt, synthetic construct
  source 1..21: mol_type = other RNA; note = Description of Artificial Sequence: Synthetic oligonucleotide
gaacatgcctagtccaacatt

SEQ ID NO: 3334 - RNA, 21 nt, synthetic construct
  source 1..21: mol_type = other RNA; note = Description of Artificial Sequence: Synthetic oligonucleotide
atcagtagtgtacattaccat

SEQ ID NO: 3335 - RNA, 21 nt, synthetic construct
  source 1..21: mol_type = other RNA; note = Description of Artificial Sequence: Synthetic oligonucleotide
atccaagtgttataccaacta

SEQ ID NO: 3336 - RNA, 21 nt, synthetic construct
  source 1..21: mol_type = other RNA; note = Description of Artificial Sequence: Synthetic oligonucleotide
ccaagtccaatatggcaacta

SEQ ID NO: 3337 - RNA, 21 nt, synthetic construct
  source 1..21: mol_type = other RNA; note = Description of Artificial Sequence: Synthetic oligonucleotide
catttcactgtctaggctaca

SEQ ID NO: 3338 - RNA, 21 nt, synthetic construct
  source 1..21: mol_type = other RNA; note = Description of Artificial Sequence: Synthetic oligonucleotide
ccacagctatatcctgatgct

SEQ ID NO: 3339 - RNA, 21 nt, synthetic construct
  source 1..21: mol_type = other RNA; note = Description of Artificial Sequence: Synthetic oligonucleotide
cttcactgaacatgcctagta

SEQ ID NO: 3340 - RNA, 21 nt, synthetic construct
  source 1..21: mol_type = other RNA; note = Description of Artificial Sequence: Synthetic oligonucleotide
gtggttgagagtgcttatgaa

SEQ ID NO: 3341 - RNA, 21 nt, synthetic construct
  source 1..21: mol_type = other RNA; note = Description of Artificial Sequence: Synthetic oligonucleotide
atatcagtagtgtacattaca

SEQ ID NO: 3342 - RNA, 21 nt, synthetic construct
  source 1..21: mol_type = other RNA; note = Description of Artificial Sequence: Synthetic oligonucleotide
caaccaactatccaagtgtta

SEQ ID NO: 3343 - RNA, 21 nt, synthetic construct
  source 1..21: mol_type = other RNA; note = Description of Artificial Sequence: Synthetic oligonucleotide
gcagatttggcagagagtata

SEQ ID NO: 3344 - RNA, 21 nt, synthetic construct
  source 1..21: mol_type = other RNA; note = Description of Artificial Sequence: Synthetic oligonucleotide
ctccttcactgaacatgccta

SEQ ID NO: 3345 - RNA, 21 nt, synthetic construct
  source 1..21: mol_type = other RNA; note = Description of Artificial Sequence: Synthetic oligonucleotide
catgcctagtccaacattttt

SEQ ID NO: 3346 - RNA, 21 nt, synthetic construct
  source 1..21: mol_type = other RNA; note = Description of Artificial Sequence: Synthetic oligonucleotide
tgccatcagtatcttaatgaa

SEQ ID NO: 3347 - RNA, 21 nt, synthetic construct
  source 1..21: mol_type = other RNA; note = Description of Artificial Sequence: Synthetic oligonucleotide
gccatcagtatcttaatgaaa

SEQ ID NO: 3348 - RNA, 21 nt, synthetic construct
  source 1..21: mol_type = other RNA; note = Description of Artificial Sequence: Synthetic oligonucleotide
ttagaacaccaaagattgtct

SEQ ID NO: 3349 - RNA, 21 nt, synthetic construct
  source 1..21: mol_type = other RNA; note = Description of Artificial Sequence: Synthetic oligonucleotide
atcatttcactgtctaggcta

SEQ ID NO: 3350 - RNA, 21 nt, synthetic construct
  source 1..21: mol_type = other RNA; note = Description of Artificial Sequence: Synthetic oligonucleotide
tcactgtctaggctacaacaa

SEQ ID NO: 3351 - RNA, 21 nt, synthetic construct
  source 1..21: mol_type = other RNA; note = Description of Artificial Sequence: Synthetic oligonucleotide
caactatccaagtgttataca

SEQ ID NO: 3352 - RNA, 21 nt, synthetic construct
  source 1..21: mol_type = other RNA; note = Description of Artificial Sequence: Synthetic oligonucleotide
ttggttccaagtccaatatga

SEQ ID NO: 3353 - RNA, 21 nt, synthetic construct
  source 1..21: mol_type = other RNA; note = Description of Artificial Sequence: Synthetic oligonucleotide
tgcttatgaggtgatcaaact

SEQ ID NO: 3354 - RNA, 21 nt, synthetic construct
  source 1..21: mol_type = other RNA; note = Description of Artificial Sequence: Synthetic oligonucleotide
tctcagaccttgtgaaggtga

SEQ ID NO: 3355 - RNA, 21 nt, synthetic construct
  source 1..21: mol_type = other RNA; note = Description of Artificial Sequence: Synthetic oligonucleotide
taaaatccacagctatatcct

SEQ ID NO: 3356 - RNA, 21 nt, synthetic construct
  source 1..21: mol_type = other RNA; note = Description of Artificial Sequence: Synthetic oligonucleotide
ccttcactgaacatgcctagt

SEQ ID NO: 3357 - RNA, 21 nt, synthetic construct
  source 1..21: mol_type = other RNA; note = Description of Artificial Sequence: Synthetic oligonucleotide
gggatccagtgtataaatcca

SEQ ID NO: 3358 - RNA, 21 nt, synthetic construct
  source 1..21: mol_type = other RNA; note = Description of Artificial Sequence: Synthetic oligonucleotide
caataaaccttgaacagtgaa

SEQ ID NO: 3359 - RNA, 21 nt, synthetic construct
  source 1..21: mol_type = other RNA; note = Description of Artificial Sequence: Synthetic oligonucleotide
ggcctgtgccatcagtatctt

SEQ ID NO: 3360 - RNA, 21 nt, synthetic construct
  source 1..21: mol_type = other RNA; note = Description of Artificial Sequence: Synthetic oligonucleotide
ttgttgatgtcatcgaagaca

SEQ ID NO: 3361 - RNA, 21 nt, synthetic construct
  source 1..21: mol_type = other RNA; note = Description of Artificial Sequence: Synthetic oligonucleotide
agatttggcagagagtataat

SEQ ID NO: 3362 - RNA, 21 nt, synthetic construct
  source 1..21: mol_type = other RNA; note = Description of Artificial Sequence: Synthetic oligonucleotide
tttccaccatgattaagggta

SEQ ID NO: 3363 - RNA, 21 nt, synthetic construct
  source 1..21: mol_type = other RNA; note = Description of Artificial Sequence: Synthetic oligonucleotide
ctaggctacaacaggattcta

SEQ ID NO: 3364 - RNA, 21 nt, synthetic construct
  source 1..21: mol_type = other RNA; note = Description of Artificial Sequence: Synthetic oligonucleotide
tggaggttgtgcatgttgtca

SEQ ID NO: 3365 - RNA, 21 nt, synthetic construct
  source 1..21: mol_type = other RNA; note = Description of Artificial Sequence: Synthetic oligonucleotide
gctccttcactgaacatgcct

SEQ ID NO: 3366 - RNA, 21 nt, synthetic construct
  source 1..21: mol_type = other RNA; note = Description of Artificial Sequence: Synthetic oligonucleotide
cttttggttccaagtccaata

SEQ ID NO: 3367 - RNA, 21 nt, synthetic construct
  source 1..21: mol_type = other RNA; note = Description of Artificial Sequence: Synthetic oligonucleotide
gcctgtgccatcagtatctta

SEQ ID NO: 3368 - RNA, 21 nt, synthetic construct
  source 1..21: mol_type = other RNA; note = Description of Artificial Sequence: Synthetic oligonucleotide
gcttatgaggtgatcaaacta

SEQ ID NO: 3369 - RNA, 21 nt, synthetic construct
  source 1..21: mol_type = other RNA; note = Description of Artificial Sequence: Synthetic oligonucleotide
cttatgaggtgatcaaactca

SEQ ID NO: 3370 - RNA, 21 nt, synthetic construct
  source 1..21: mol_type = other RNA; note = Description of Artificial Sequence: Synthetic oligonucleotide
ccttgcattttgggacagaat

SEQ ID NO: 3371 - RNA, 21 nt, synthetic construct
  source 1..21: mol_type = other RNA; note = Description of Artificial Sequence: Synthetic oligonucleotide
ggttccaagtccaatatggca

SEQ ID NO: 3372 - RNA, 21 nt, synthetic construct
  source 1..21: mol_type = other RNA; note = Description of Artificial Sequence: Synthetic oligonucleotide
cactgtctaggctacaacaga

SEQ ID NO: 3373 - RNA, 21 nt, synthetic construct
  source 1..21: mol_type = other RNA; note = Description of Artificial Sequence: Synthetic oligonucleotide
actgtctaggctacaacagga

SEQ ID NO: 3374 - RNA, 21 nt, synthetic construct
  source 1..21: mol_type = other RNA; note = Description of Artificial Sequence: Synthetic oligonucleotide
aataagattacagttgttgga

SEQ ID NO: 3375 - RNA, 21 nt, synthetic construct
  source 1..21: mol_type = other RNA; note = Description of Artificial Sequence: Synthetic oligonucleotide
gttgagagtgcttatgaggta

SEQ ID NO: 3376 - RNA, 21 nt, synthetic construct
  source 1..21: mol_type = other RNA; note = Description of Artificial Sequence: Synthetic oligonucleotide
gtctaggctacaacaggatta

SEQ ID NO: 3377 - RNA, 21 nt, synthetic construct
  source 1..21: mol_type = other RNA; note = Description of Artificial Sequence: Synthetic oligonucleotide
tctaggctacaacaggattct

SEQ ID NO: 3378 - RNA, 21 nt, synthetic construct
  source 1..21: mol_type = other RNA; note = Description of Artificial Sequence: Synthetic oligonucleotide
gtggaggttgtgcatgttgta

SEQ ID NO: 3379 - RNA, 21 nt, synthetic construct
  source 1..21: mol_type = other RNA; note = Description of Artificial Sequence: Synthetic oligonucleotide
tgaggtgatcaaactcaaaga

SEQ ID NO: 3380 - RNA, 21 nt, synthetic construct
  source 1..21: mol_type = other RNA; note = Description of Artificial Sequence: Synthetic oligonucleotide
gtgatcaaactcaaaggctaa

SEQ ID NO: 3381 - RNA, 21 nt, synthetic construct
  source 1..21: mol_type = other RNA; note = Description of Artificial Sequence: Synthetic oligonucleotide
tgaggaagaggcccgtttgaa

SEQ ID NO: 3382 - RNA, 21 nt, synthetic construct
  source 1..21: mol_type = other RNA; note = Description of Artificial Sequence: Synthetic oligonucleotide
acaagcaggtggttgagagta

SEQ ID NO: 3383 - RNA, 21 nt, synthetic construct
  source 1..21: mol_type = other RNA; note = Description of Artificial Sequence: Synthetic oligonucleotide
cagatttggcagagagtataa

SEQ ID NO: 3384 - RNA, 21 nt, synthetic construct
  source 1..21: mol_type = other RNA; note = Description of Artificial Sequence: Synthetic oligonucleotide
gtgcttatgaggtgatcaaac

SEQ ID NO: 3385 - RNA, 21 nt, synthetic construct
  source 1..21: mol_type = other RNA; note = Description of Artificial Sequence: Synthetic oligonucleotide
agcagatttggcagagagtat

SEQ ID NO: 3386 - RNA, 21 nt, synthetic construct
  source 1..21: mol_type = other RNA; note = Description of Artificial Sequence: Synthetic oligonucleotide
atttggcagagagtataatga

SEQ ID NO: 3387 - RNA, 21 nt, synthetic construct
  source 1..21: mol_type = other RNA; note = Description of Artificial Sequence: Synthetic oligonucleotide
tttggcagagagtataatgaa

SEQ ID NO: 3388 - RNA, 21 nt, synthetic construct
  source 1..21: mol_type = other RNA; note = Description of Artificial Sequence: Synthetic oligonucleotide
cttgcattttgggacagaata

SEQ ID NO: 3389 - RNA, 21 nt, synthetic construct
  source 1..21: mol_type = other RNA; note = Description of Artificial Sequence: Synthetic oligonucleotide
atggaatctcagaccttgtga

SEQ ID NO: 3390 - RNA, 21 nt, synthetic construct
  source 1..21: mol_type = other RNA; note = Description of Artificial Sequence: Synthetic oligonucleotide
cacagctatatcctgatgcta

SEQ ID NO: 3391 - RNA, 21 nt, synthetic construct
  source 1..21: mol_type = other RNA; note = Description of Artificial Sequence: Synthetic oligonucleotide
gaggaagaggcccgtttgaaa

SEQ ID NO: 3392 - RNA, 21 nt, synthetic construct
  source 1..21: mol_type = other RNA; note = Description of Artificial Sequence: Synthetic oligonucleotide
tctgaggaagaggcccgttta

SEQ ID NO: 3393 - RNA, 21 nt, synthetic construct
  source 1..21: mol_type = other RNA; note = Description of Artificial Sequence: Synthetic oligonucleotide
cacatcctgggatccagtgta

SEQ ID NO: 3394 - RNA, 21 nt, synthetic construct
  source 1..21: mol_type = other RNA; note = Description of Artificial Sequence: Synthetic oligonucleotide
agccttttccttagaacacca

SEQ ID NO: 3395 - RNA, 21 nt, synthetic construct
  source 1..21: mol_type = other RNA; note = Description of Artificial Sequence: Synthetic oligonucleotide
tcaactggttagtgtgaaata

SEQ ID NO: 3396 - RNA, 23 nt, synthetic construct
  source 1..23: mol_type = other RNA; note = Description of Artificial Sequence: Synthetic oligonucleotide
tttaatcacagatcagataaaaa

SEQ ID NO: 3397 - RNA, 23 nt, synthetic construct
  source 1..23: mol_type = other RNA; note = Description of Artificial Sequence: Synthetic oligonucleotide
aactatttcacactaaccagttg

SEQ ID NO: 3398 - RNA, 23 nt, synthetic construct
  source 1..23: mol_type = other RNA; note = Description of Artificial Sequence: Synthetic oligonucleotide
aaatgttggactaggcatgttca

SEQ ID NO: 3399 - RNA, 23 nt, synthetic construct
  source 1..23: mol_type = other RNA; note = Description of Artificial Sequence: Synthetic oligonucleotide
agagttgccatattggacttgga

SEQ ID NO: 3400 - RNA, 23 nt, synthetic construct
  source 1..23: mol_type = other RNA; note = Description of Artificial Sequence: Synthetic oligonucleotide
aagacccttaatcatggtggaaa

SEQ ID NO: 3401 - RNA, 23 nt, synthetic construct
  source 1..23: mol_type = other RNA; note = Description of Artificial Sequence: Synthetic oligonucleotide
ttagcctagacagtgaaatgata

SEQ ID NO: 3402 - RNA, 23 nt, synthetic construct
  source 1..23: mol_type = other RNA; note = Description of Artificial Sequence: Synthetic oligonucleotide
acagatcagataaaaaggacaac

SEQ ID NO: 3403 - RNA, 23 nt, synthetic construct
  source 1..23: mol_type = other RNA; note = Description of Artificial Sequence: Synthetic oligonucleotide
tatattggatttatacactggat

SEQ ID NO: 3404 - RNA, 23 nt, synthetic construct
  source 1..23: mol_type = other RNA; note = Description of Artificial Sequence: Synthetic oligonucleotide
ttagttggtataacacttggata

SEQ ID NO: 3405 - RNA, 23 nt, synthetic construct
  source 1..23: mol_type = other RNA; note = Description of Artificial Sequence: Synthetic oligonucleotide
tttcaatttgtcttcgatgacat

SEQ ID NO: 3406 - RNA, 23 nt, synthetic construct
  source 1..23: mol_type = other RNA; note = Description of Artificial Sequence: Synthetic oligonucleotide
tagagacaatctttggtgttcta

SEQ ID NO: 3407 - RNA, 23 nt, synthetic construct
  source 1..23: mol_type = other RNA; note = Description of Artificial Sequence: Synthetic oligonucleotide
tcagagacaatctttggtgttct

SEQ ID NO: 3408 - RNA, 23 nt, synthetic construct
  source 1..23: mol_type = other RNA; note = Description of Artificial Sequence: Synthetic oligonucleotide
atcagataaaaaggacaacatgc

SEQ ID NO: 3409 - RNA, 23 nt, synthetic construct
  source 1..23: mol_type = other RNA; note = Description of Artificial Sequence: Synthetic oligonucleotide
atttctaacttcaggagttgatg

SEQ ID NO: 3410 - RNA, 23 nt, synthetic construct
  source 1..23: mol_type = other RNA; note = Description of Artificial Sequence: Synthetic oligonucleotide
tggtataacacttggatagttgg

SEQ ID NO: 3411 - RNA, 23 nt, synthetic construct
  source 1..23: mol_type = other RNA; note = Description of Artificial Sequence: Synthetic oligonucleotide
taatctttggtgttctaaggaaa

SEQ ID NO: 3412 - RNA, 23 nt, synthetic construct
  source 1..23: mol_type = other RNA; note = Description of Artificial Sequence: Synthetic oligonucleotide
agactacacaagattaataccat

SEQ ID NO: 3413 - RNA, 23 nt, synthetic construct
  source 1..23: mol_type = other RNA; note = Description of Artificial Sequence: Synthetic oligonucleotide
tgcatgttcagtgaaggagccag

SEQ ID NO: 3414 - RNA, 23 nt, synthetic construct
  source 1..23: mol_type = other RNA; note = Description of Artificial Sequence: Synthetic oligonucleotide
tggtaatgtacactactgatata

SEQ ID NO: 3415 - RNA, 23 nt, synthetic construct
  source 1..23: mol_type = other RNA; note = Description of Artificial Sequence: Synthetic oligonucleotide
tgtgttctaaggaaaaggctgcc

SEQ ID NO: 3416 - RNA, 23 nt, synthetic construct
  source 1..23: mol_type = other RNA; note = Description of Artificial Sequence: Synthetic oligonucleotide
taactatttcacactaaccagtt

SEQ ID NO: 3417 - RNA, 23 nt, synthetic construct
  source 1..23: mol_type = other RNA; note = Description of Artificial Sequence: Synthetic oligonucleotide
aatgtacactactgatatagttc

SEQ ID NO: 3418 - RNA, 23 nt, synthetic construct
  source 1..23: mol_type = other RNA; note = Description of Artificial Sequence: Synthetic oligonucleotide
ttaatgtacactactgatatagt

SEQ ID NO: 3419 - RNA, 23 nt, synthetic construct
  source 1..23: mol_type = other RNA; note = Description of Artificial Sequence: Synthetic oligonucleotide
tagtccatcttaaaatattactg

SEQ ID NO: 3420 - RNA, 23 nt, synthetic construct
  source 1..23: mol_type = other RNA; note = Description of Artificial Sequence: Synthetic oligonucleotide
ttttcccagtccatcttaaaata

SEQ ID NO: 3421 - RNA, 23 nt, synthetic construct
  source 1..23: mol_type = other RNA; note = Description of Artificial Sequence: Synthetic oligonucleotide
agaactatttcacactaaccagt

SEQ ID NO: 3422 - RNA, 23 nt, synthetic construct
  source 1..23: mol_type = other RNA; note = Description of Artificial Sequence: Synthetic oligonucleotide
tgactaggcatgttcagtgaagg

SEQ ID NO: 3423 - RNA, 23 nt, synthetic construct
  source 1..23: mol_type = other RNA; note = Description of Artificial Sequence: Synthetic oligonucleotide
tataacacttggatagttggttg

SEQ ID NO: 3424 - RNA, 23 nt, synthetic construct
  source 1..23: mol_type = other RNA; note = Description of Artificial Sequence: Synthetic oligonucleotide
tttagttggtataacacttggat

SEQ ID NO: 3425 - RNA, 23 nt, synthetic construct
  source 1..23: mol_type = other RNA; note = Description of Artificial Sequence: Synthetic oligonucleotide
tggacttggaaccaaaaggaatc

SEQ ID NO: 3426 - RNA, 23 nt, synthetic construct
  source 1..23: mol_type = other RNA; note = Description of Artificial Sequence: Synthetic oligonucleotide
ttgttctaaggaaaaggctgcca

SEQ ID NO: 3427 - RNA, 23 nt, synthetic construct
  source 1..23: mol_type = other RNA; note = Description of Artificial Sequence: Synthetic oligonucleotide
agtccatcttaaaatattactgc

SEQ ID NO: 3428 - RNA, 23 nt, synthetic construct
  source 1..23: mol_type = other RNA; note = Description of Artificial Sequence: Synthetic oligonucleotide
taggatatagctgtggattttac

SEQ ID NO: 3429 - RNA, 23 nt, synthetic construct
  source 1..23: mol_type = other RNA; note = Description of Artificial Sequence: Synthetic oligonucleotide
ttaggcatgttcagtgaaggagc

SEQ ID NO: 3430 - RNA, 23 nt, synthetic construct
  source 1..23: mol_type = other RNA; note = Description of Artificial Sequence: Synthetic oligonucleotide
ttggactaggcatgttcagtgaa

SEQ ID NO: 3431 - RNA, 23 nt, synthetic construct
  source 1..23: mol_type = other RNA; note = Description of Artificial Sequence: Synthetic oligonucleotide
gttttagttggtataacacttgg

SEQ ID NO: 3432 - RNA, 23 nt, synthetic construct
  source 1..23: mol_type = other RNA; note = Description of Artificial Sequence: Synthetic oligonucleotide
agacccttaatcatggtggaaac

SEQ ID NO: 3433 - RNA, 23 nt, synthetic construct
  source 1..23: mol_type = other RNA; note = Description of Artificial Sequence: Synthetic oligonucleotide
aatgttggactaggcatgttcag

SEQ ID NO: 3434 - RNA, 23 nt, synthetic construct
  source 1..23: mol_type = other RNA; note = Description of Artificial Sequence: Synthetic oligonucleotide
atggtaatgtacactactgatat

SEQ ID NO: 3435 - RNA, 23 nt, synthetic construct
  source 1..23: mol_type = other RNA; note = Description of Artificial Sequence: Synthetic oligonucleotide
tagttggtataacacttggatag

SEQ ID NO: 3436 - RNA, 23 nt, synthetic construct
  source 1..23: mol_type = other RNA; note = Description of Artificial Sequence: Synthetic oligonucleotide
tagttgccatattggacttggaa

SEQ ID NO: 3437 - RNA, 23 nt, synthetic construct
  source 1..23: mol_type = other RNA; note = Description of Artificial Sequence: Synthetic oligonucleotide
taccttcacaaggtctgagattc

SEQ ID NO: 3438 - RNA, 23 nt, synthetic construct
  source 1..23: mol_type = other RNA; note = Description of Artificial Sequence: Synthetic oligonucleotide
tgtagcctagacagtgaaatgat

SEQ ID NO: 3439 - RNA, 23 nt, synthetic construct
  source 1..23: mol_type = other RNA; note = Description of Artificial Sequence: Synthetic oligonucleotide
agcatcaggatatagctgtggat

SEQ ID NO: 3440 - RNA, 23 nt, synthetic construct
  source 1..23: mol_type = other RNA; note = Description of Artificial Sequence: Synthetic oligonucleotide
tactaggcatgttcagtgaagga

SEQ ID NO: 3441 - RNA, 23 nt, synthetic construct
  source 1..23: mol_type = other RNA; note = Description of Artificial Sequence: Synthetic oligonucleotide
ttcataagcactctcaaccacct

SEQ ID NO: 3442 - RNA, 23 nt, synthetic construct
  source 1..23: mol_type = other RNA; note = Description of Artificial Sequence: Synthetic oligonucleotide
tatgtgtagcctttgagtttgat

SEQ ID NO: 3443 - RNA, 23 nt, synthetic construct
  source 1..23: mol_type = other RNA; note = Description of Artificial Sequence: Synthetic oligonucleotide
tgtaatgtacactactgatatag

SEQ ID NO: 3444 - RNA, 23 nt, synthetic construct
  source 1..23: mol_type = other RNA; note = Description of Artificial Sequence: Synthetic oligonucleotide
taacacttggatagttggttgca

SEQ ID NO: 3445 - RNA, 23 nt, synthetic construct
  source 1..23: mol_type = other RNA; note = Description of Artificial Sequence: Synthetic oligonucleotide
tcttcaatttgtcttcgatgaca

SEQ ID NO: 3446 - RNA, 23 nt, synthetic construct
  source 1..23: mol_type = other RNA; note = Description of Artificial Sequence: Synthetic oligonucleotide
tatactctctgccaaatctgcta

SEQ ID NO: 3447 - RNA, 23 nt, synthetic construct
  source 1..23: mol_type = other RNA; note = Description of Artificial Sequence: Synthetic oligonucleotide
taggcatgttcagtgaaggagcc

SEQ ID NO: 3448 - RNA, 23 nt, synthetic construct
  source 1..23: mol_type = other RNA; note = Description of Artificial Sequence: Synthetic oligonucleotide
aaaaatgttggactaggcatgtt

SEQ ID NO: 3449 - RNA, 23 nt, synthetic construct
  source 1..23: mol_type = other RNA; note = Description of Artificial Sequence: Synthetic oligonucleotide
ttcattaagatactgatggcaca

SEQ ID NO: 3450 - RNA, 23 nt, synthetic construct
  source 1..23: mol_type = other RNA; note = Description of Artificial Sequence: Synthetic oligonucleotide
tttcattaagatactgatggcac

SEQ ID NO: 3451 - RNA, 23 nt, synthetic construct
  source 1..23: mol_type = other RNA; note = Description of Artificial Sequence: Synthetic oligonucleotide
agacaatctttggtgttctaagg

SEQ ID NO: 3452 - RNA, 23 nt, synthetic construct
  source 1..23: mol_type = other RNA; note = Description of Artificial Sequence: Synthetic oligonucleotide
tagcctagacagtgaaatgatat

SEQ ID NO: 3453 - RNA, 23 nt, synthetic construct
  source 1..23: mol_type = other RNA; note = Description of Artificial Sequence: Synthetic oligonucleotide
ttgttgtagcctagacagtgaaa

SEQ ID NO: 3454 - RNA, 23 nt, synthetic construct
  source 1..23: mol_type = other RNA; note = Description of Artificial Sequence: Synthetic oligonucleotide
ttggatttatacactggatccca

SEQ ID NO: 3455 - RNA, 23 nt, synthetic construct
  source 1..23: mol_type = other RNA; note = Description of Artificial Sequence: Synthetic oligonucleotide
tgtataacacttggatagttggt

SEQ ID NO: 3456 - RNA, 23 nt, synthetic construct
  source 1..23: mol_type = other RNA; note = Description of Artificial Sequence: Synthetic oligonucleotide
tcatattggacttggaaccaaaa

SEQ ID NO: 3457 - RNA, 23 nt, synthetic construct
  source 1..23: mol_type = other RNA; note = Description of Artificial Sequence: Synthetic oligonucleotide
agtttgatcacctcataagcact

SEQ ID NO: 3458 - RNA, 23 nt, synthetic construct
  source 1..23: mol_type = other RNA; note = Description of Artificial Sequence: Synthetic oligonucleotide
tgatgtgtagcctttgagtttga

SEQ ID NO: 3459 - RNA, 23 nt, synthetic construct
  source 1..23: mol_type = other RNA; note = Description of Artificial Sequence: Synthetic oligonucleotide
tcaccttcacaaggtctgagatt

SEQ ID NO: 3460 - RNA, 23 nt, synthetic construct
  source 1..23: mol_type = other RNA; note = Description of Artificial Sequence: Synthetic oligonucleotide
aggatatagctgtggattttaca

SEQ ID NO: 3461 - RNA, 23 nt, synthetic construct
  source 1..23: mol_type = other RNA; note = Description of Artificial Sequence: Synthetic oligonucleotide
actaggcatgttcagtgaaggag

SEQ ID NO: 3462 - RNA, 23 nt, synthetic construct
  source 1..23: mol_type = other RNA; note = Description of Artificial Sequence: Synthetic oligonucleotide
tggatttatacactggatcccag

SEQ ID NO: 3463 - RNA, 23 nt, synthetic construct
  source 1..23: mol_type = other RNA; note = Description of Artificial Sequence: Synthetic oligonucleotide
ttcactgttcaaggtttattggg

SEQ ID NO: 3464 - RNA, 23 nt, synthetic construct
  source 1..23: mol_type = other RNA; note = Description of Artificial Sequence: Synthetic oligonucleotide
aagatactgatggcacaggccat

SEQ ID NO: 3465 - RNA, 23 nt, synthetic construct
  source 1..23: mol_type = other RNA; note = Description of Artificial Sequence: Synthetic oligonucleotide
tgtcttcgatgacatcaacaaga

SEQ ID NO: 3466 - RNA, 23 nt, synthetic construct
  source 1..23: mol_type = other RNA; note = Description of Artificial Sequence: Synthetic oligonucleotide
atagttcacaaaataagatcctt

SEQ ID NO: 3467 - RNA, 23 nt, synthetic construct
  source 1..23: mol_type = other RNA; note = Description of Artificial Sequence: Synthetic oligonucleotide
agttcacaaaataagatcctttg

SEQ ID NO: 3468 - RNA, 23 nt, synthetic construct
  source 1..23: mol_type = other RNA; note = Description of Artificial Sequence: Synthetic oligonucleotide
taattatgcacaagacatgatat

SEQ ID NO: 3469 - RNA, 23 nt, synthetic construct
  source 1..23: mol_type = other RNA; note = Description of Artificial Sequence: Synthetic oligonucleotide
agacagtgaaatgatatgacatc

SEQ ID NO: 3470 - RNA, 23 nt, synthetic construct
  source 1..23: mol_type = other RNA; note = Description of Artificial Sequence: Synthetic oligonucleotide
ttagacagtgaaatgatatgaca

SEQ ID NO: 3471 - RNA, 23 nt, synthetic construct
  source 1..23: mol_type = other RNA; note = Description of Artificial Sequence: Synthetic oligonucleotide
ttcctttagaagattataaatca

SEQ ID NO: 3472 - RNA, 23 nt, synthetic construct
  source 1..23: mol_type = other RNA; note = Description of Artificial Sequence: Synthetic oligonucleotide
agctgtggattttacaaaccatt

SEQ ID NO: 3473 - RNA, 23 nt, synthetic construct
  source 1..23: mol_type = other RNA; note = Description of Artificial Sequence: Synthetic oligonucleotide
aagattaataccatccagcatca

SEQ ID NO: 3474 - RNA, 23 nt, synthetic construct
  source 1..23: mol_type = other RNA; note = Description of Artificial Sequence: Synthetic oligonucleotide
atgtacactactgatatagttca

SEQ ID NO: 3475 - RNA, 23 nt, synthetic construct
  source 1..23: mol_type = other RNA; note = Description of Artificial Sequence: Synthetic oligonucleotide
tttctaacttcaggagttgatgt

SEQ ID NO: 3476 - RNA, 23 nt, synthetic construct
  source 1..23: mol_type = other RNA; note = Description of Artificial Sequence: Synthetic oligonucleotide
tacaagattaataccatccagca

SEQ ID NO: 3477 - RNA, 23 nt, synthetic construct
  source 1..23: mol_type = other RNA; note = Description of Artificial Sequence: Synthetic oligonucleotide
agcctagacagtgaaatgatatg

SEQ ID NO: 3478 - RNA, 23 nt, synthetic construct
  source 1..23: mol_type = other RNA; note = Description of Artificial Sequence: Synthetic oligonucleotide
tgatatagctgtggattttacaa

SEQ ID NO: 3479 - RNA, 23 nt, synthetic construct
  source 1..23: mol_type = other RNA; note = Description of Artificial Sequence: Synthetic oligonucleotide
aaatgcaaggaacactaaggaag

SEQ ID NO: 3480 - RNA, 23 nt, synthetic construct
  source 1..23: mol_type = other RNA; note = Description of Artificial Sequence: Synthetic oligonucleotide
tctagacagtgaaatgatatgac

SEQ ID NO: 3481 - RNA, 23 nt, synthetic construct
  source 1..23: mol_type = other RNA; note = Description of Artificial Sequence: Synthetic oligonucleotide
ttaacttcaggagttgatgtttt

SEQ ID NO: 3482 - RNA, 23 nt, synthetic construct
  source 1..23: mol_type = other RNA; note = Description of Artificial Sequence: Synthetic oligonucleotide
ttaataccatccagcatcaggat

SEQ ID NO: 3483 - RNA, 23 nt, synthetic construct
  source 1..23: mol_type = other RNA; note = Description of Artificial Sequence: Synthetic oligonucleotide
acttggatagttggttgcattgt

SEQ ID NO: 3484 - RNA, 23 nt, synthetic construct
  source 1..23: mol_type = other RNA; note = Description of Artificial Sequence: Synthetic oligonucleotide
tatcatcctttattccgtaaaga

SEQ ID NO: 3485 - RNA, 23 nt, synthetic construct
  source 1..23: mol_type = other RNA; note = Description of Artificial Sequence: Synthetic oligonucleotide
aatgcaaggaacactaaggaaga

SEQ ID NO: 3486 - RNA, 23 nt, synthetic construct
  source 1..23: mol_type = other RNA; note = Description of Artificial Sequence: Synthetic oligonucleotide
tttggatagttggttgcattgtt

SEQ ID NO: 3487 - RNA, 23 nt, synthetic construct
  source 1..23: mol_type = other RNA; note = Description of Artificial Sequence: Synthetic oligonucleotide
attatactctctgccaaatctgc

SEQ ID NO: 3488 - RNA, 23 nt, synthetic construct
  source 1..23: mol_type = other RNA; note = Description of Artificial Sequence: Synthetic oligonucleotide
tacccttaatcatggtggaaact

SEQ ID NO: 3489 - RNA, 23 nt, synthetic construct
  source 1..23: mol_type = other RNA; note = Description of Artificial Sequence: Synthetic oligonucleotide
aactatttcacactaaccagttg

SEQ ID NO: 3490 - RNA, 23 nt, synthetic construct
  source 1..23: mol_type = other RNA; note = Description of Artificial Sequence: Synthetic oligonucleotide
agagttgccatattggacttgga

SEQ ID NO: 3491 - RNA, 23 nt, synthetic construct
  source 1..23: mol_type = other RNA; note = Description of Artificial Sequence: Synthetic oligonucleotide
aagacccttaatcatggtggaaa

SEQ ID NO: 3492 - RNA, 23 nt, synthetic construct
  source 1..23: mol_type = other RNA; note = Description of Artificial Sequence: Synthetic oligonucleotide
ttagcctagacagtgaaatgata

SEQ ID NO: 3493 - RNA, 23 nt, synthetic construct
  source 1..23: mol_type = other RNA; note = Description of Artificial Sequence: Synthetic oligonucleotide
acagatcagataaaaaggacaac

SEQ ID NO: 3494 - RNA, 23 nt, synthetic construct
  source 1..23: mol_type = other RNA; note = Description of Artificial Sequence: Synthetic oligonucleotide
tatattggatttatacactggat

SEQ ID NO: 3495 - RNA, 23 nt, synthetic construct
  source 1..23: mol_type = other RNA; note = Description of Artificial Sequence: Synthetic oligonucleotide
ttagttggtataacacttggata

SEQ ID NO: 3496 - RNA, 23 nt, synthetic construct
  source 1..23: mol_type = other RNA; note = Description of Artificial Sequence: Synthetic oligonucleotide
tagagacaatctttggtgttcta

SEQ ID NO: 3497 - RNA, 23 nt, synthetic construct
  source 1..23: mol_type = other RNA; note = Description of Artificial Sequence: Synthetic oligonucleotide
tcagagacaatctttggtgttct

SEQ ID NO: 3498 - RNA, 23 nt, synthetic construct
  source 1..23: mol_type = other RNA; note = Description of Artificial Sequence: Synthetic oligonucleotide
atcagataaaaaggacaacatgc

SEQ ID NO: 3499 - RNA, 23 nt, synthetic construct
  source 1..23: mol_type = other RNA; note = Description of Artificial Sequence: Synthetic oligonucleotide
atttctaacttcaggagttgatg

SEQ ID NO: 3500 - RNA, 23 nt, synthetic construct
  source 1..23: mol_type = other RNA; note = Description of Artificial Sequence: Synthetic oligonucleotide
tggtataacacttggatagttgg

SEQ ID NO: 3501 - RNA, 23 nt, synthetic construct
  source 1..23: mol_type = other RNA; note = Description of Artificial Sequence: Synthetic oligonucleotide
agactacacaagattaataccat

SEQ ID NO: 3502 - RNA, 23 nt, synthetic construct
  source 1..23: mol_type = other RNA; note = Description of Artificial Sequence: Synthetic oligonucleotide
tgcatgttcagtgaaggagccag

SEQ ID NO: 3503 - RNA, 23 nt, synthetic construct
  source 1..23: mol_type = other RNA; note = Description of Artificial Sequence: Synthetic oligonucleotide
tggtaatgtacactactgatata

SEQ ID NO: 3504 - RNA, 23 nt, synthetic construct
  source 1..23: mol_type = other RNA; note = Description of Artificial Sequence: Synthetic oligonucleotide
tgtgttctaaggaaaaggctgcc

SEQ ID NO: 3505 - RNA, 23 nt, synthetic construct
  source 1..23: mol_type = other RNA; note = Description of Artificial Sequence: Synthetic oligonucleotide
taactatttcacactaaccagtt

SEQ ID NO: 3506 - RNA, 23 nt, synthetic construct
  source 1..23: mol_type = other RNA; note = Description of Artificial Sequence: Synthetic oligonucleotide
aatgtacactactgatatagttc

SEQ ID NO: 3507 - RNA, 23 nt, synthetic construct
  source 1..23: mol_type = other RNA; note = Description of Artificial Sequence: Synthetic oligonucleotide
ttaatgtacactactgatatagt

SEQ ID NO: 3508 - RNA, 23 nt, synthetic construct
  source 1..23: mol_type = other RNA; note = Description of Artificial Sequence: Synthetic oligonucleotide
tagtccatcttaaaatattactg

SEQ ID NO: 3509 - RNA, 23 nt, synthetic construct
  source 1..23: mol_type = other RNA; note = Description of Artificial Sequence: Synthetic oligonucleotide
ttttcccagtccatcttaaaata

SEQ ID NO: 3510 - RNA, 23 nt, synthetic construct
  source 1..23: mol_type = other RNA; note = Description of Artificial Sequence: Synthetic oligonucleotide
tgactaggcatgttcagtgaagg

SEQ ID NO: 3511 - RNA, 23 nt, synthetic construct
  source 1..23: mol_type = other RNA; note = Description of Artificial Sequence: Synthetic oligonucleotide
tataacacttggatagttggttg

SEQ ID NO: 3512 - RNA, 23 nt, synthetic construct
  source 1..23: mol_type = other RNA; note = Description of Artificial Sequence: Synthetic oligonucleotide
tttagttggtataacacttggat

SEQ ID NO: 3513 - RNA, 23 nt, synthetic construct
  source 1..23: mol_type = other RNA; note = Description of Artificial Sequence: Synthetic oligonucleotide
agtccatcttaaaatattactgc

SEQ ID NO: 3514 - RNA, 23 nt, synthetic construct
  source 1..23: mol_type = other RNA; note = Description of Artificial Sequence: Synthetic oligonucleotide
taggatatagctgtggattttac

SEQ ID NO: 3515 - RNA, 23 nt, synthetic construct
  source 1..23: mol_type = other RNA; note = Description of Artificial Sequence: Synthetic oligonucleotide
ttaggcatgttcagtgaaggagc

SEQ ID NO: 3516 - RNA, 23 nt, synthetic construct
  source 1..23: mol_type = other RNA; note = Description of Artificial Sequence: Synthetic oligonucleotide
ttggactaggcatgttcagtgaa

SEQ ID NO: 3517 - RNA, 23 nt, synthetic construct
  source 1..23: mol_type = other RNA; note = Description of Artificial Sequence: Synthetic oligonucleotide
gttttagttggtataacacttgg

SEQ ID NO: 3518 - RNA, 23 nt, synthetic construct
  source 1..23: mol_type = other RNA; note = Description of Artificial Sequence: Synthetic oligonucleotide
agacccttaatcatggtggaaac

SEQ ID NO: 3519 - RNA, 23 nt, synthetic construct
  source 1..23: mol_type = other RNA; note = Description of Artificial Sequence: Synthetic oligonucleotide
aatgttggactaggcatgttcag

SEQ ID NO: 3520 - RNA, 23 nt, synthetic construct
  source 1..23: mol_type = other RNA; note = Description of Artificial Sequence: Synthetic oligonucleotide
atggtaatgtacactactgatat

SEQ ID NO: 3521 - RNA, 23 nt, synthetic construct
  source 1..23: mol_type = other RNA; note = Description of Artificial Sequence: Synthetic oligonucleotide
tagttggtataacacttggatag

SEQ ID NO: 3522 - RNA, 23 nt, synthetic construct
  source 1..23: mol_type = other RNA; note = Description of Artificial Sequence: Synthetic oligonucleotide
tagttgccatattggacttggaa

SEQ ID NO: 3523 - RNA, 23 nt, synthetic construct
  source 1..23: mol_type = other RNA; note = Description of Artificial Sequence: Synthetic oligonucleotide
tgtagcctagacagtgaaatgat

SEQ ID NO: 3524 - RNA, 23 nt, synthetic construct
  source 1..23: mol_type = other RNA; note = Description of Artificial Sequence: Synthetic oligonucleotide
agcatcaggatatagctgtggat

SEQ ID NO: 3525 - RNA, 23 nt, synthetic construct
  source 1..23: mol_type = other RNA; note = Description of Artificial Sequence: Synthetic oligonucleotide
tactaggcatgttcagtgaagga

SEQ ID NO: 3526 - RNA, 23 nt, synthetic construct
  source 1..23: mol_type = other RNA; note = Description of Artificial Sequence: Synthetic oligonucleotide
ttcataagcactctcaaccacct

SEQ ID NO: 3527 - RNA, 23 nt, synthetic construct
  source 1..23: mol_type = other RNA; note = Description of Artificial Sequence: Synthetic oligonucleotide
tgtaatgtacactactgatatag

SEQ ID NO: 3528 - RNA, 23 nt, synthetic construct
  source 1..23: mol_type = other RNA; note = Description of Artificial Sequence: Synthetic oligonucleotide
taacacttggatagttggttgca

SEQ ID NO: 3529 - RNA, 23 nt, synthetic construct
  source 1..23: mol_type = other RNA; note = Description of Artificial Sequence: Synthetic oligonucleotide
tatactctctgccaaatctgcta

SEQ ID NO: 3530 - RNA, 23 nt, synthetic construct
  source 1..23: mol_type = other RNA; note = Description of Artificial Sequence: Synthetic oligonucleotide
taggcatgttcagtgaaggagcc

SEQ ID NO: 3531 - RNA, 23 nt, synthetic construct
  source 1..23: mol_type = other RNA; note = Description of Artificial Sequence: Synthetic oligonucleotide
aaaaatgttggactaggcatgtt

SEQ ID NO: 3532 - RNA, 23 nt, synthetic construct
  source 1..23: mol_type = other RNA; note = Description of Artificial Sequence: Synthetic oligonucleotide
ttcattaagatactgatggcaca

SEQ ID NO: 3533 - RNA, 23 nt, synthetic construct
  source 1..23: mol_type = other RNA; note = Description of Artificial Sequence: Synthetic oligonucleotide
tttcattaagatactgatggcac

SEQ ID NO: 3534 - RNA, 23 nt, synthetic construct
  source 1..23: mol_type = other RNA; note = Description of Artificial Sequence: Synthetic oligonucleotide
agacaatctttggtgttctaagg

SEQ ID NO: 3535 - RNA, 23 nt, synthetic construct
  source 1..23: mol_type = other RNA; note = Description of Artificial Sequence: Synthetic oligonucleotide
tagcctagacagtgaaatgatat

SEQ ID NO: 3536 - RNA, 23 nt, synthetic construct
  source 1..23: mol_type = other RNA; note = Description of Artificial Sequence: Synthetic oligonucleotide
ttgttgtagcctagacagtgaaa

SEQ ID NO: 3537 - RNA, 23 nt, synthetic construct
  source 1..23: mol_type = other RNA; note = Description of Artificial Sequence: Synthetic oligonucleotide
tgtataacacttggatagttggt

SEQ ID NO: 3538 - RNA, 23 nt, synthetic construct
  source 1..23: mol_type = other RNA; note = Description of Artificial Sequence: Synthetic oligonucleotide
tcatattggacttggaaccaaaa

SEQ ID NO: 3539 - RNA, 23 nt, synthetic construct
  source 1..23: mol_type = other RNA; note = Description of Artificial Sequence: Synthetic oligonucleotide
agtttgatcacctcataagcact

SEQ ID NO: 3540 - RNA, 23 nt, synthetic construct
  source 1..23: mol_type = other RNA; note = Description of Artificial Sequence: Synthetic oligonucleotide
tcaccttcacaaggtctgagatt

SEQ ID NO: 3541 - RNA, 23 nt, synthetic construct
  source 1..23: mol_type = other RNA; note = Description of Artificial Sequence: Synthetic oligonucleotide
aggatatagctgtggattttaca

SEQ ID NO: 3542 - RNA, 23 nt, synthetic construct
  source 1..23: mol_type = other RNA; note = Description of Artificial Sequence: Synthetic oligonucleotide
actaggcatgttcagtgaaggag

SEQ ID NO: 3543 - RNA, 23 nt, synthetic construct
  source 1..23: mol_type = other RNA; note = Description of Artificial Sequence: Synthetic oligonucleotide
tggatttatacactggatcccag

SEQ ID NO: 3544 - RNA, 23 nt, synthetic construct
  source 1..23: mol_type = other RNA; note = Description of Artificial Sequence: Synthetic oligonucleotide
ttcactgttcaaggtttattggg

SEQ ID NO: 3545 - RNA, 23 nt, synthetic construct
  source 1..23: mol_type = other RNA; note = Description of Artificial Sequence: Synthetic oligonucleotide
aagatactgatggcacaggccat

SEQ ID NO: 3546 - RNA, 23 nt, synthetic construct
  source 1..23: mol_type = other RNA; note = Description of Artificial Sequence: Synthetic oligonucleotide
tgtcttcgatgacatcaacaaga

SEQ ID NO: 3547 - RNA, 23 nt, synthetic construct
  source 1..23: mol_type = other RNA; note = Description of Artificial Sequence: Synthetic oligonucleotide
attatactctctgccaaatctgc

SEQ ID NO: 3548 - RNA, 23 nt, synthetic construct
  source 1..23: mol_type = other RNA; note = Description of Artificial Sequence: Synthetic oligonucleotide
tacccttaatcatggtggaaact

SEQ ID NO: 3549 - RNA, 23 nt, synthetic construct
  source 1..23: mol_type = other RNA; note = Description of Artificial Sequence: Synthetic oligonucleotide
tagaatcctgttgtagcctagac

SEQ ID NO: 3550 - RNA, 23 nt, synthetic construct
  source 1..23: mol_type = other RNA; note = Description of Artificial Sequence: Synthetic oligonucleotide
tgacaacatgcacaacctccacc

SEQ ID NO: 3551 - RNA, 23 nt, synthetic construct
  source 1..23: mol_type = other RNA; note = Description of Artificial Sequence: Synthetic oligonucleotide
aggcatgttcagtgaaggagcca

SEQ ID NO: 3552 - RNA, 23 nt, synthetic construct
  source 1..23: mol_type = other RNA; note = Description of Artificial Sequence: Synthetic oligonucleotide
tattggacttggaaccaaaagga

SEQ ID NO: 3553 - RNA, 23 nt, synthetic construct
  source 1..23: mol_type = other RNA; note = Description of Artificial Sequence: Synthetic oligonucleotide
taagatactgatggcacaggcca

SEQ ID NO: 3554 - RNA, 23 nt, synthetic construct
  source 1..23: mol_type = other RNA; note = Description of Artificial Sequence: Synthetic oligonucleotide
tagtttgatcacctcataagcac

SEQ ID NO: 3555 - RNA, 23 nt, synthetic construct
  source 1..23: mol_type = other RNA; note = Description of Artificial Sequence: Synthetic oligonucleotide
tgagtttgatcacctcataagca

SEQ ID NO: 3556 - RNA, 23 nt, synthetic construct
  source 1..23: mol_type = other RNA; note = Description of Artificial Sequence: Synthetic oligonucleotide
attctgtcccaaaatgcaaggaa

SEQ ID NO: 3557 - RNA, 23 nt, synthetic construct
  source 1..23: mol_type = other RNA; note = Description of Artificial Sequence: Synthetic oligonucleotide
tgccatattggacttggaaccaa

SEQ ID NO: 3558 - RNA, 23 nt, synthetic construct
  source 1..23: mol_type = other RNA; note = Description of Artificial Sequence: Synthetic oligonucleotide
tctgttgtagcctagacagtgaa

SEQ ID NO: 3559 - RNA, 23 nt, synthetic construct
  source 1..23: mol_type = other RNA; note = Description of Artificial Sequence: Synthetic oligonucleotide
tcctgttgtagcctagacagtga

SEQ ID NO: 3560 - RNA, 23 nt, synthetic construct
  source 1..23: mol_type = other RNA; note = Description of Artificial Sequence: Synthetic oligonucleotide
tccaacaactgtaatcttattct

SEQ ID NO: 3561 - RNA, 23 nt, synthetic construct
  source 1..23: mol_type = other RNA; note = Description of Artificial Sequence: Synthetic oligonucleotide
tacctcataagcactctcaacca

SEQ ID NO: 3562 - RNA, 23 nt, synthetic construct
  source 1..23: mol_type = other RNA; note = Description of Artificial Sequence: Synthetic oligonucleotide
taatcctgttgtagcctagacag

SEQ ID NO: 3563 - RNA, 23 nt, synthetic construct
  source 1..23: mol_type = other RNA; note = Description of Artificial Sequence: Synthetic oligonucleotide
agaatcctgttgtagcctagaca

SEQ ID NO: 3564 - RNA, 23 nt, synthetic construct
  source 1..23: mol_type = other RNA; note = Description of Artificial Sequence: Synthetic oligonucleotide
tacaacatgcacaacctccacct

SEQ ID NO: 3565 - RNA, 23 nt, synthetic construct
  source 1..23: mol_type = other RNA; note = Description of Artificial Sequence: Synthetic oligonucleotide
tctttgagtttgatcacctcata

SEQ ID NO: 3566 - RNA, 23 nt, synthetic construct
  source 1..23: mol_type = other RNA; note = Description of Artificial Sequence: Synthetic oligonucleotide
ttagcctttgagtttgatcacct

SEQ ID NO: 3567 - RNA, 23 nt, synthetic construct
  source 1..23: mol_type = other RNA; note = Description of Artificial Sequence: Synthetic oligonucleotide
ttcaaacgggcctcttcctcaga

SEQ ID NO: 3568 - RNA, 23 nt, synthetic construct
  source 1..23: mol_type = other RNA; note = Description of Artificial Sequence: Synthetic oligonucleotide
tactctcaaccacctgcttgtga

SEQ ID NO: 3569 - RNA, 23 nt, synthetic construct
  source 1..23: mol_type = other RNA; note = Description of Artificial Sequence: Synthetic oligonucleotide
ttatactctctgccaaatctgct

SEQ ID NO: 3570 - RNA, 23 nt, synthetic construct
  source 1..23: mol_type = other RNA; note = Description of Artificial Sequence: Synthetic oligonucleotide
gtttgatcacctcataagcactc

SEQ ID NO: 3571 - RNA, 23 nt, synthetic construct
  source 1..23: mol_type = other RNA; note = Description of Artificial Sequence: Synthetic oligonucleotide
atactctctgccaaatctgctac

SEQ ID NO: 3572 - RNA, 23 nt, synthetic construct
  source 1..23: mol_type = other RNA; note = Description of Artificial Sequence: Synthetic oligonucleotide
tcattatactctctgccaaatct

SEQ ID NO: 3573 - RNA, 23 nt, synthetic construct
  source 1..23: mol_type = other RNA; note = Description of Artificial Sequence: Synthetic oligonucleotide
ttcattatactctctgccaaatc

SEQ ID NO: 3574 - RNA, 23 nt, synthetic construct
  source 1..23: mol_type = other RNA; note = Description of Artificial Sequence: Synthetic oligonucleotide
tattctgtcccaaaatgcaagga

SEQ ID NO: 3575 - RNA, 23 nt, synthetic construct
  source 1..23: mol_type = other RNA; note = Description of Artificial Sequence: Synthetic oligonucleotide
tcacaaggtctgagattccattc

SEQ ID NO: 3576 - RNA, 23 nt, synthetic construct
  source 1..23: mol_type = other RNA; note = Description of Artificial Sequence: Synthetic oligonucleotide
tagcatcaggatatagctgtgga

SEQ ID NO: 3577 - RNA, 23 nt, synthetic construct
  source 1..23: mol_type = other RNA; note = Description of Artificial Sequence: Synthetic oligonucleotide
tttcaaacgggcctcttcctcag

SEQ ID NO: 3578 - RNA, 23 nt, synthetic construct
  source 1..23: mol_type = other RNA; note = Description of Artificial Sequence: Synthetic oligonucleotide
taaacgggcctcttcctcagaag

SEQ ID NO: 3579 - RNA, 23 nt, synthetic construct
  source 1..23: mol_type = other RNA; note = Description of Artificial Sequence: Synthetic oligonucleotide
tacactggatcccaggatgtgac

SEQ ID NO: 3580 - RNA, 23 nt, synthetic construct
  source 1..23: mol_type = other RNA; note = Description of Artificial Sequence: Synthetic oligonucleotide
tggtgttctaaggaaaaggctgc

SEQ ID NO: 3581 - RNA, 23 nt, synthetic construct
  source 1..23: mol_type = other RNA; note = Description of Artificial Sequence: Synthetic oligonucleotide
tatttcacactaaccagttgaag

SEQ ID NO: 3582 - RNA, 21 nt, synthetic construct
  source 1..21: mol_type = other RNA; note = Description of Artificial Sequence: Synthetic oligonucleotide
  modified_base 1: mod_base = OTHER; note = 2'-O-methyluridine-3'-phosphorothioate
  modified_base 2: mod_base = OTHER; note = 2'-O-methyluridine-3'-phosphorothioate
  modified_base 3: mod_base = OTHER; note = 2'-O-methyluridine-3'-phosphate
  modified_base 4: mod_base = OTHER; note = 2'-O-methyladenosine-3'-phosphate
  modified_base 5: mod_base = OTHER; note = 2'-O-methyluridine-3'-phosphate
  modified_base 6: mod_base = OTHER; note = 2'-O-methylcytidine-3'-phosphate
  modified_base 7: mod_base = OTHER; note = 2'-fluorouridine-3'-phosphate
  modified_base 8: mod_base = OTHER; note = 2'-O-methylguanosine-3'-phosphate
  modified_base 9: mod_base = OTHER; note = 2'-fluoroadenosine-3'-phosphate
  modified_base 10: mod_base = OTHER; note = 2'-fluorouridine-3'-phosphate
  modified_base 11: mod_base = OTHER; note = 2'-fluorocytidine-3'-phosphate
  modified_base 12: mod_base = OTHER; note = 2'-O-methyluridine-3'-phosphate
  modified_base 13: mod_base = OTHER; note = 2'-O-methylguanosine-3'-phosphate
  modified_base 14: mod_base = OTHER; note = 2'-O-methyluridine-3'-phosphate
  modified_base 15: mod_base = OTHER; note = 2'-O-methylguanosine-3'-phosphate
  modified_base 16: mod_base = OTHER; note = 2'-O-methyladenosine-3'-phosphate
  modified_base 17: mod_base = OTHER; note = 2'-O-methyluridine-3'-phosphate
  modified_base 18: mod_base = OTHER; note = 2'-O-methyluridine-3'-phosphate
  modified_base 19: mod_base = OTHER; note = 2'-O-methyladenosine-3'-phosphate
  modified_base 20: mod_base = OTHER; note = 2'-O-methyladenosine-3'-phosphate
  modified_base 21: mod_base = OTHER; note = 2'-O-methyladenosine-3'-phosphate N-[tris(GalNAc-alkyl)-amidodecanoyl)]-4-hydroxyprolinol Hyp-(GalNAc-alkyl)3
tttatctgatctgtgattaaa

SEQ ID NO: 3583 - RNA, 21 nt, synthetic construct
  source 1..21: mol_type = other RNA; note = Description of Artificial Sequence: Synthetic oligonucleotide
  modified_base 1: mod_base = OTHER; note = 2'-O-methyladenosine-3'-phosphorothioate
  modified_base 2: mod_base = OTHER; note = 2'-O-methylcytidine-3'-phosphorothioate
  modified_base 3: mod_base = OTHER; note = 2'-O-methyluridine-3'-phosphate
  modified_base 4: mod_base = OTHER; note = 2'-O-methylguanosine-3'-phosphate
  modified_base 5: mod_base = OTHER; note = 2'-O-methylguanosine-3'-phosphate
  modified_base 6: mod_base = OTHER; note = 2'-O-methyluridine-3'-phosphate
  modified_base 7: mod_base = OTHER; note = 2'-fluorouridine-3'-phosphate
  modified_base 8: mod_base = OTHER; note = 2'-O-methyladenosine-3'-phosphate
  modified_base 9: mod_base = OTHER; note = 2'-fluoroguanosine-3'-phosphate
  modified_base 10: mod_base = OTHER; note = 2'-fluorouridine-3'-phosphate
  modified_base 11: mod_base = OTHER; note = 2'-fluoroguanosine-3'-phosphate
  modified_base 12: mod_base = OTHER; note = 2'-O-methyluridine-3'-phosphate
  modified_base 13: mod_base = OTHER; note = 2'-O-methylguanosine-3'-phosphate
  modified_base 14: mod_base = OTHER; note = 2'-O-methyladenosine-3'-phosphate
  modified_base 15: mod_base = OTHER; note = 2'-O-methyladenosine-3'-phosphate
  modified_base 16: mod_base = OTHER; note = 2'-O-methyladenosine-3'-phosphate
  modified_base 17: mod_base = OTHER; note = 2'-O-methyluridine-3'-phosphate
  modified_base 18: mod_base = OTHER; note = 2'-O-methyladenosine-3'-phosphate
  modified_base 19: mod_base = OTHER; note = 2'-O-methylguanosine-3'-phosphate
  modified_base 20: mod_base = OTHER; note = 2'-O-methyluridine-3'-phosphate
  modified_base 21: mod_base = OTHER; note = 2'-O-methyluridine-3'-phosphate N-[tris(GalNAc-alkyl)-amidodecanoyl)]-4-hydroxyprolinol Hyp-(GalNAc-alkyl)3
actggttagtgtgaaatagtt

SEQ ID NO: 3584 - RNA, 21 nt, synthetic construct
  source 1..21: mol_type = other RNA; note = Description of Artificial Sequence: Synthetic oligonucleotide
  modified_base 1: mod_base = OTHER; note = 2'-O-methyladenosine-3'-phosphorothioate
  modified_base 2: mod_base = OTHER; note = 2'-O-methyladenosine-3'-phosphorothioate
  modified_base 3: mod_base = OTHER; note = 2'-O-methylcytidine-3'-phosphate
  modified_base 4: mod_base = OTHER; note = 2'-O-methyladenosine-3'-phosphate
  modified_base 5: mod_base = OTHER; note = 2'-O-methyluridine-3'-phosphate
  modified_base 6: mod_base = OTHER; note = 2'-O-methylguanosine-3'-phosphate
  modified_base 7: mod_base = OTHER; note = 2'-fluorocytidine-3'-phosphate
  modified_base 8: mod_base = OTHER; note = 2'-O-methylcytidine-3'-phosphate
  modified_base 9: mod_base = OTHER; note = 2'-fluorouridine-3'-phosphate
  modified_base 10: mod_base = OTHER; note = 2'-fluoroadenosine-3'-phosphate
  modified_base 11: mod_base = OTHER; note = 2'-fluoroguanosine-3'-phosphate
  modified_base 12: mod_base = OTHER; note = 2'-O-methyluridine-3'-phosphate
  modified_base 13: mod_base = OTHER; note = 2'-O-methylcytidine-3'-phosphate
  modified_base 14: mod_base = OTHER; note = 2'-O-methylcytidine-3'-phosphate
  modified_base 15: mod_base = OTHER; note = 2'-O-methyladenosine-3'-phosphate
  modified_base 16: mod_base = OTHER; note = 2'-O-methyladenosine-3'-phosphate
  modified_base 17: mod_base = OTHER; note = 2'-O-methylcytidine-3'-phosphate
  modified_base 18: mod_base = OTHER; note = 2'-O-methyladenosine-3'-phosphate
  modified_base 19: mod_base = OTHER; note = 2'-O-methyluridine-3'-phosphate
  modified_base 20: mod_base = OTHER; note = 2'-O-methyluridine-3'-phosphate
  modified_base 21: mod_base = OTHER; note = 2'-O-methyluridine-3'-phosphate N-[tris(GalNAc-alkyl)-amidodecanoyl)]-4-hydroxyprolinol Hyp-(GalNAc-alkyl)3
aacatgcctagtccaacattt

SEQ ID NO: 3585 - RNA, 21 nt, synthetic construct
  source 1..21: mol_type = other RNA; note = Description of Artificial Sequence: Synthetic oligonucleotide
  modified_base 1: mod_base = OTHER; note = 2'-O-methylcytidine-3'-phosphorothioate
  modified_base 2: mod_base = OTHER; note = 2'-O-methyladenosine-3'-phosphorothioate
  modified_base 3: mod_base = OTHER; note = 2'-O-methyladenosine-3'-phosphate
  modified_base 4: mod_base = OTHER; note = 2'-O-methylguanosine-3'-phosphate
  modified_base 5: mod_base = OTHER; note = 2'-O-methyluridine-3'-phosphate
  modified_base 6: mod_base = OTHER; note = 2'-O-methylcytidine-3'-phosphate
  modified_base 7: mod_base = OTHER; note = 2'-fluorocytidine-3'-phosphate
  modified_base 8: mod_base = OTHER; note = 2'-O-methyladenosine-3'-phosphate
  modified_base 9: mod_base = OTHER; note = 2'-fluoroadenosine-3'-phosphate
  modified_base 10: mod_base = OTHER; note = 2'-fluorouridine-3'-phosphate
  modified_base 11: mod_base = OTHER; note = 2'-fluoroadenosine-3'-phosphate
  modified_base 12: mod_base = OTHER; note = 2'-O-methyluridine-3'-phosphate
  modified_base 13: mod_base = OTHER; note = 2'-O-methylguanosine-3'-phosphate
  modified_base 14: mod_base = OTHER; note = 2'-O-methylguanosine-3'-phosphate
  modified_base 15: mod_base = OTHER; note = 2'-O-methylcytidine-3'-phosphate
  modified_base 16: mod_base = OTHER; note = 2'-O-methyladenosine-3'-phosphate
  modified_base 17: mod_base = OTHER; note = 2'-O-methyladenosine-3'-phosphate
  modified_base 18: mod_base = OTHER; note = 2'-O-methylcytidine-3'-phosphate
  modified_base 19: mod_base = OTHER; note = 2'-O-methyluridine-3'-phosphate
  modified_base 20: mod_base = OTHER; note = 2'-O-methylcytidine-3'-phosphate
  modified_base 21: mod_base = OTHER; note = 2'-O-methyluridine-3'-phosphate N-[tris(GalNAc-alkyl)-amidodecanoyl)]-4-hydroxyprolinol Hyp-(GalNAc-alkyl)3
caagtccaatatggcaactct

SEQ ID NO: 3586 - RNA, 21 nt, synthetic construct
  source 1..21: mol_type = other RNA; note = Description of Artificial Sequence: Synthetic oligonucleotide
  modified_base 1: mod_base = OTHER; note = 2'-O-methyluridine-3'-phosphorothioate
  modified_base 2: mod_base = OTHER; note = 2'-O-methylcytidine-3'-phosphorothioate
  modified_base 3: mod_base = OTHER; note = 2'-O-methylcytidine-3'-phosphate
  modified_base 4: mod_base = OTHER; note = 2'-O-methyladenosine-3'-phosphate
  modified_base 5: mod_base = OTHER; note = 2'-O-methylcytidine-3'-phosphate
  modified_base 6: mod_base = OTHER; note = 2'-O-methylcytidine-3'-phosphate
  modified_base 7: mod_base = OTHER; note = 2'-fluoroadenosine-3'-phosphate
  modified_base 8: mod_base = OTHER; note = 2'-O-methyluridine-3'-phosphate
  modified_base 9: mod_base = OTHER; note = 2'-fluoroguanosine-3'-phosphate
  modified_base 10: mod_base = OTHER; note = 2'-fluoroadenosine-3'-phosphate
  modified_base 11: mod_base = OTHER; note = 2'-fluorouridine-3'-phosphate
  modified_base 12: mod_base = OTHER; note = 2'-O-methyluridine-3'-phosphate
  modified_base 13: mod_base = OTHER; note = 2'-O-methyladenosine-3'-phosphate
  modified_base 14: mod_base = OTHER; note = 2'-O-methyladenosine-3'-phosphate
  modified_base 15: mod_base = OTHER; note = 2'-O-methylguanosine-3'-phosphate
  modified_base 16: mod_base = OTHER; note = 2'-O-methylguanosine-3'-phosphate
  modified_base 17: mod_base = OTHER; note = 2'-O-methylguanosine-3'-phosphate
  modified_base 18: mod_base = OTHER; note = 2'-O-methyluridine-3'-phosphate
  modified_base 19: mod_base = OTHER; note = 2'-O-methylcytidine-3'-phosphate
  modified_base 20: mod_base = OTHER; note = 2'-O-methyluridine-3'-phosphate
  modified_base 21: mod_base = OTHER; note = 2'-O-methyluridine-3'-phosphate N-[tris(GalNAc-alkyl)-amidodecanoyl)]-4-hydroxyprolinol Hyp-(GalNAc-alkyl)3
tccaccatgattaagggtctt

SEQ ID NO: 3587 - RNA, 21 nt, synthetic construct
  source 1..21: mol_type = other RNA; note = Description of Artificial Sequence: Synthetic oligonucleotide
  modified_base 1: mod_base = OTHER; note = 2'-O-methyluridine-3'-phosphorothioate
  modified_base 2: mod_base = OTHER; note = 2'-O-methylcytidine-3'-phosphorothioate
  modified_base 3: mod_base = OTHER; note = 2'-O-methyladenosine-3'-phosphate
  modified_base 4: mod_base = OTHER; note = 2'-O-methyluridine-3'-phosphate
  modified_base 5: mod_base = OTHER; note = 2'-O-methyluridine-3'-phosphate
  modified_base 6: mod_base = OTHER; note = 2'-O-methyluridine-3'-phosphate
  modified_base 7: mod_base = OTHER; note = 2'-fluorocytidine-3'-phosphate
  modified_base 8: mod_base = OTHER; note = 2'-O-methyladenosine-3'-phosphate
  modified_base 9: mod_base = OTHER; note = 2'-fluorocytidine-3'-phosphate
  modified_base 10: mod_base = OTHER; note = 2'-fluorouridine-3'-phosphate
  modified_base 11: mod_base = OTHER; note = 2'-fluoroguanosine-3'-phosphate
  modified_base 12: mod_base = OTHER; note = 2'-O-methyluridine-3'-phosphate
  modified_base 13: mod_base = OTHER; note = 2'-O-methylcytidine-3'-phosphate
  modified_base 14: mod_base = OTHER; note = 2'-O-methyluridine-3'-phosphate
  modified_base 15: mod_base = OTHER; note = 2'-O-methyladenosine-3'-phosphate
  modified_base 16: mod_base = OTHER; note = 2'-O-methylguanosine-3'-phosphate
  modified_base 17: mod_base = OTHER; note = 2'-O-methylguanosine-3'-phosphate
  modified_base 18: mod_base = OTHER; note = 2'-O-methylcytidine-3'-phosphate
  modified_base 19: mod_base = OTHER; note = 2'-O-methyluridine-3'-phosphate
  modified_base 20: mod_base = OTHER; note = 2'-O-methyladenosine-3'-phosphate
  modified_base 21: mod_base = OTHER; note = 2'-O-methyladenosine-3'-phosphate N-[tris(GalNAc-alkyl)-amidodecanoyl)]-4-hydroxyprolinol Hyp-(GalNAc-alkyl)3
tcatttcactgtctaggctaa

SEQ ID NO: 3588 - RNA, 21 nt, synthetic construct
  source 1..21: mol_type = other RNA; note = Description of Artificial Sequence: Synthetic oligonucleotide
  modified_base 1: mod_base = OTHER; note = 2'-O-methyluridine-3'-phosphorothioate
  modified_base 2: mod_base = OTHER; note = 2'-O-methylguanosine-3'-phosphorothioate
  modified_base 3: mod_base = OTHER; note = 2'-O-methyluridine-3'-phosphate
  modified_base 4: mod_base = OTHER; note = 2'-O-methylcytidine-3'-phosphate
  modified_base 5: mod_base = OTHER; note = 2'-O-methylcytidine-3'-phosphate
  modified_base 6: mod_base = OTHER; note = 2'-O-methyluridine-3'-phosphate
  modified_base 7: mod_base = OTHER; note = 2'-fluorouridine-3'-phosphate
  modified_base 8: mod_base = OTHER; note = 2'-O-methyluridine-3'-phosphate
  modified_base 9: mod_base = OTHER; note = 2'-fluorouridine-3'-phosphate
  modified_base 10: mod_base = OTHER; note = 2'-fluorouridine-3'-phosphate
  modified_base 11: mod_base = OTHER; note = 2'-fluoroadenosine-3'-phosphate
  modified_base 12: mod_base = OTHER; note = 2'-O-methyluridine-3'-phosphate
  modified_base 13: mod_base = OTHER; note = 2'-O-methylcytidine-3'-phosphate
  modified_base 14: mod_base = OTHER; note = 2'-O-methyluridine-3'-phosphate
  modified_base 15: mod_base = OTHER; note = 2'-O-methylguanosine-3'-phosphate
  modified_base 16: mod_base = OTHER; note = 2'-O-methyladenosine-3'-phosphate
  modified_base 17: mod_base = OTHER; note = 2'-O-methyluridine-3'-phosphate
  modified_base 18: mod_base = OTHER; note = 2'-O-methylcytidine-3'-phosphate
  modified_base 19: mod_base = OTHER; note = 2'-O-methyluridine-3'-phosphate
  modified_base 20: mod_base = OTHER; note = 2'-O-methylguanosine-3'-phosphate
  modified_base 21: mod_base = OTHER; note = 2'-O-methyluridine-3'-phosphate N-[tris(GalNAc-alkyl)-amidodecanoyl)]-4-hydroxyprolinol Hyp-(GalNAc-alkyl)3
tgtcctttttatctgatctgt

SEQ ID NO: 3589 - RNA, 21 nt, synthetic construct
  source 1..21: mol_type = other RNA; note = Description of Artificial Sequence: Synthetic oligonucleotide
  modified_base 1: mod_base = OTHER; note = 2'-O-methylcytidine-3'-phosphorothioate
  modified_base 2: mod_base = OTHER; note = 2'-O-methylcytidine-3'-phosphorothioate
  modified_base 3: mod_base = OTHER; note = 2'-O-methyladenosine-3'-phosphate
  modified_base 4: mod_base = OTHER; note = 2'-O-methylguanosine-3'-phosphate
  modified_base 5: mod_base = OTHER; note = 2'-O-methyluridine-3'-phosphate
  modified_base 6: mod_base = OTHER; note = 2'-O-methylguanosine-3'-phosphate
  modified_base 7: mod_base = OTHER; note = 2'-fluorouridine-3'-phosphate
  modified_base 8: mod_base = OTHER; note = 2'-O-methyladenosine-3'-phosphate
  modified_base 9: mod_base = OTHER; note = 2'-fluorouridine-3'-phosphate
  modified_base 10: mod_base = OTHER; note = 2'-fluoroadenosine-3'-phosphate
  modified_base 11: mod_base = OTHER; note = 2'-fluoroadenosine-3'-phosphate
  modified_base 12: mod_base = OTHER; note = 2'-O-methyladenosine-3'-phosphate
  modified_base 13: mod_base = OTHER; note = 2'-O-methyluridine-3'-phosphate
  modified_base 14: mod_base = OTHER; note = 2'-O-methylcytidine-3'-phosphate
  modified_base 15: mod_base = OTHER; note = 2'-O-methylcytidine-3'-phosphate
  modified_base 16: mod_base = OTHER; note = 2'-O-methyladenosine-3'-phosphate
  modified_base 17: mod_base = OTHER; note = 2'-O-methyladenosine-3'-phosphate
  modified_base 18: mod_base = OTHER; note = 2'-O-methyluridine-3'-phosphate
  modified_base 19: mod_base = OTHER; note = 2'-O-methyladenosine-3'-phosphate
  modified_base 20: mod_base = OTHER; note = 2'-O-methyluridine-3'-phosphate
  modified_base 21: mod_base = OTHER; note = 2'-O-methyladenosine-3'-phosphate N-[tris(GalNAc-alkyl)-amidodecanoyl)]-4-hydroxyprolinol Hyp-(GalNAc-alkyl)3
ccagtgtataaatccaatata

SEQ ID NO: 3590 - RNA, 21 nt, synthetic construct
  source 1..21: mol_type = other RNA; note = Description of Artificial Sequence: Synthetic oligonucleotide
  modified_base 1: mod_base = OTHER; note = 2'-O-methyluridine-3'-phosphorothioate
  modified_base 2: mod_base = OTHER; note = 2'-O-methylcytidine-3'-phosphorothioate
  modified_base 3: mod_base = OTHER; note = 2'-O-methylcytidine-3'-phosphate
  modified_base 4: mod_base = OTHER; note = 2'-O-methyladenosine-3'-phosphate
  modified_base 5: mod_base = OTHER; note = 2'-O-methyladenosine-3'-phosphate
  modified_base 6: mod_base = OTHER; note = 2'-O-methylguanosine-3'-phosphate
  modified_base 7: mod_base = OTHER; note = 2'-fluorouridine-3'-phosphate
  modified_base 8: mod_base = OTHER; note = 2'-O-methylguanosine-3'-phosphate
  modified_base 9: mod_base = OTHER; note = 2'-fluorouridine-3'-phosphate
  modified_base 10: mod_base = OTHER; note = 2'-fluorouridine-3'-phosphate
  modified_base 11: mod_base = OTHER; note = 2'-fluoroadenosine-3'-phosphate
  modified_base 12: mod_base = OTHER; note = 2'-O-methyluridine-3'-phosphate
  modified_base 13: mod_base = OTHER; note = 2'-O-methyladenosine-3'-phosphate
  modified_base 14: mod_base = OTHER; note = 2'-O-methylcytidine-3'-phosphate
  modified_base 15: mod_base = OTHER; note = 2'-O-methylcytidine-3'-phosphate
  modified_base 16: mod_base = OTHER; note = 2'-O-methyladenosine-3'-phosphate
  modified_base 17: mod_base = OTHER; note = 2'-O-methyladenosine-3'-phosphate
  modified_base 18: mod_base = OTHER; note = 2'-O-methylcytidine-3'-phosphate
  modified_base 19: mod_base = OTHER; note = 2'-O-methyluridine-3'-phosphate
  modified_base 20: mod_base = OTHER; note = 2'-O-methyladenosine-3'-phosphate
  modified_base 21: mod_base = OTHER; note = 2'-O-methyladenosine-3'-phosphate N-[tris(GalNAc-alkyl)-amidodecanoyl)]-4-hydroxyprolinol Hyp-(GalNAc-alkyl)3
tccaagtgttataccaactaa

SEQ ID NO: 3591 - RNA, 21 nt, synthetic construct
  source 1..21: mol_type = other RNA; note = Description of Artificial Sequence: Synthetic oligonucleotide
  modified_base 1: mod_base = OTHER; note = 2'-O-methylguanosine-3'-phosphorothioate
  modified_base 2: mod_base = OTHER; note = 2'-O-methyluridine-3'-phosphorothioate
  modified_base 3: mod_base = OTHER; note = 2'-O-methylcytidine-3'-phosphate
  modified_base 4: mod_base = OTHER; note = 2'-O-methyladenosine-3'-phosphate
  modified_base 5: mod_base = OTHER; note = 2'-O-methyluridine-3'-phosphate
  modified_base 6: mod_base = OTHER; note = 2'-O-methylcytidine-3'-phosphate
  modified_base 7: mod_base = OTHER; note = 2'-fluoroguanosine-3'-phosphate
  modified_base 8: mod_base = OTHER; note = 2'-O-methyladenosine-3'-phosphate
  modified_base 9: mod_base = OTHER; note = 2'-fluoroadenosine-3'-phosphate
  modified_base 10: mod_base = OTHER; note = 2'-fluoroguanosine-3'-phosphate
  modified_base 11: mod_base = OTHER; note = 2'-fluoroadenosine-3'-phosphate
  modified_base 12: mod_base = OTHER; note = 2'-O-methylcytidine-3'-phosphate
  modified_base 13: mod_base = OTHER; note = 2'-O-methyladenosine-3'-phosphate
  modified_base 14: mod_base = OTHER; note = 2'-O-methyladenosine-3'-phosphate
  modified_base 15: mod_base = OTHER; note = 2'-O-methyladenosine-3'-phosphate
  modified_base 16: mod_base = OTHER; note = 2'-O-methyluridine-3'-phosphate
  modified_base 17: mod_base = OTHER; note = 2'-O-methyluridine-3'-phosphate
  modified_base 18: mod_base = OTHER; note = 2'-O-methylguanosine-3'-phosphate
  modified_base 19: mod_base = OTHER; note = 2'-O-methyladenosine-3'-phosphate
  modified_base 20: mod_base = OTHER; note = 2'-O-methyladenosine-3'-phosphate
  modified_base 21: mod_base = OTHER; note = 2'-O-methyladenosine-3'-phosphate N-[tris(GalNAc-alkyl)-amidodecanoyl)]-4-hydroxyprolinol Hyp-(GalNAc-alkyl)3
gtcatcgaagacaaattgaaa

SEQ ID NO: 3592 - RNA, 21 nt, synthetic construct
  source 1..21: mol_type = other RNA; note = Description of Artificial Sequence: Synthetic oligonucleotide
  modified_base 1: mod_base = OTHER; note = 2'-O-methylguanosine-3'-phosphorothioate
  modified_base 2: mod_base = OTHER; note = 2'-O-methyladenosine-3'-phosphorothioate
  modified_base 3: mod_base = OTHER; note = 2'-O-methyladenosine-3'-phosphate
  modified_base 4: mod_base = OTHER; note = 2'-O-methylcytidine-3'-phosphate
  modified_base 5: mod_base = OTHER; note = 2'-O-methyladenosine-3'-phosphate
  modified_base 6: mod_base = OTHER; note = 2'-O-methylcytidine-3'-phosphate
  modified_base 7: mod_base = OTHER; note = 2'-fluorocytidine-3'-phosphate
  modified_base 8: mod_base = OTHER; note = 2'-O-methyladenosine-3'-phosphate
  modified_base 9: mod_base = OTHER; note = 2'-fluoroadenosine-3'-phosphate
  modified_base 10: mod_base = OTHER; note = 2'-fluoroadenosine-3'-phosphate
  modified_base 11: mod_base = OTHER; note = 2'-fluoroguanosine-3'-phosphate
  modified_base 12: mod_base = OTHER; note = 2'-O-methyladenosine-3'-phosphate
  modified_base 13: mod_base = OTHER; note = 2'-O-methyluridine-3'-phosphate
  modified_base 14: mod_base = OTHER; note = 2'-O-methyluridine-3'-phosphate
  modified_base 15: mod_base = OTHER; note = 2'-O-methylguanosine-3'-phosphate
  modified_base 16: mod_base = OTHER; note = 2'-O-methyluridine-3'-phosphate
  modified_base 17: mod_base = OTHER; note = 2'-O-methylcytidine-3'-phosphate
  modified_base 18: mod_base = OTHER; note = 2'-O-methyluridine-3'-phosphate
  modified_base 19: mod_base = OTHER; note = 2'-O-methylcytidine-3'-phosphate
  modified_base 20: mod_base = OTHER; note = 2'-O-methyluridine-3'-phosphate
  modified_base 21: mod_base = OTHER; note = 2'-O-methyladenosine-3'-phosphate N-[tris(GalNAc-alkyl)-amidodecanoyl)]-4-hydroxyprolinol Hyp-(GalNAc-alkyl)3
gaacaccaaagattgtctcta

SEQ ID NO: 3593 - RNA, 21 nt, synthetic construct
  source 1..21: mol_type = other RNA; note = Description of Artificial Sequence: Synthetic oligonucleotide
  modified_base 1: mod_base = OTHER; note = 2'-O-methyladenosine-3'-phosphorothioate
  modified_base 2: mod_base = OTHER; note = 2'-O-methyladenosine-3'-phosphorothioate
  modified_base 3: mod_base = OTHER; note = 2'-O-methylcytidine-3'-phosphate
  modified_base 4: mod_base = OTHER; note = 2'-O-methyladenosine-3'-phosphate
  modified_base 5: mod_base = OTHER; note = 2'-O-methylcytidine-3'-phosphate
  modified_base 6: mod_base = OTHER; note = 2'-O-methylcytidine-3'-phosphate
  modified_base 7: mod_base = OTHER; note = 2'-fluoroadenosine-3'-phosphate
  modified_base 8: mod_base = OTHER; note = 2'-O-methyladenosine-3'-phosphate
  modified_base 9: mod_base = OTHER; note = 2'-fluoroadenosine-3'-phosphate
  modified_base 10: mod_base = OTHER; note = 2'-fluoroguanosine-3'-phosphate
  modified_base 11: mod_base = OTHER; note = 2'-fluoroadenosine-3'-phosphate
  modified_base 12: mod_base = OTHER; note = 2'-O-methyluridine-3'-phosphate
  modified_base 13: mod_base = OTHER; note = 2'-O-methyluridine-3'-phosphate
  modified_base 14: mod_base = OTHER; note = 2'-O-methylguanosine-3'-phosphate
  modified_base 15: mod_base = OTHER; note = 2'-O-methyluridine-3'-phosphate
  modified_base 16: mod_base = OTHER; note = 2'-O-methylcytidine-3'-phosphate
  modified_base 17: mod_base = OTHER; note = 2'-O-methyluridine-3'-phosphate
  modified_base 18: mod_base = OTHER; note = 2'-O-methylcytidine-3'-phosphate
  modified_base 19: mod_base = OTHER; note = 2'-O-methyluridine-3'-phosphate
  modified_base 20: mod_base = OTHER; note = 2'-O-methylguanosine-3'-phosphate
  modified_base 21: mod_base = OTHER; note = 2'-O-methyladenosine-3'-phosphate N-[tris(GalNAc-alkyl)-amidodecanoyl)]-4-hydroxyprolinol Hyp-(GalNAc-alkyl)3
aacaccaaagattgtctctga

SEQ ID NO: 3594 - RNA, 21 nt, synthetic construct
  source 1..21: mol_type = other RNA; note = Description of Artificial Sequence: Synthetic oligonucleotide
  modified_base 1: mod_base = OTHER; note = 2'-O-methyladenosine-3'-phosphorothioate
  modified_base 2: mod_base = OTHER; note = 2'-O-methyluridine-3'-phosphorothioate
  modified_base 3: mod_base = OTHER; note = 2'-O-methylguanosine-3'-phosphate
  modified_base 4: mod_base = OTHER; note = 2'-O-methyluridine-3'-phosphate
  modified_base 5: mod_base = OTHER; note = 2'-O-methyluridine-3'-phosphate
  modified_base 6: mod_base = OTHER; note = 2'-O-methylguanosine-3'-phosphate
  modified_base 7: mod_base = OTHER; note = 2'-fluorouridine-3'-phosphate
  modified_base 8: mod_base = OTHER; note = 2'-O-methylcytidine-3'-phosphate
  modified_base 9: mod_base = OTHER; note = 2'-fluorocytidine-3'-phosphate
  modified_base 10: mod_base = OTHER; note = 2'-fluorouridine-3'-phosphate
  modified_base 11: mod_base = OTHER; note = 2'-fluorouridine-3'-phosphate
  modified_base 12: mod_base = OTHER; note = 2'-O-methyluridine-3'-phosphate
  modified_base 13: mod_base = OTHER; note = 2'-O-methyluridine-3'-phosphate
  modified_base 14: mod_base = OTHER; note = 2'-O-methyluridine-3'-phosphate
  modified_base 15: mod_base = OTHER; note = 2'-O-methyladenosine-3'-phosphate
  modified_base 16: mod_base = OTHER; note = 2'-O-methyluridine-3'-phosphate
  modified_base 17: mod_base = OTHER; note = 2'-O-methylcytidine-3'-phosphate
  modified_base 18: mod_base = OTHER; note = 2'-O-methyluridine-3'-phosphate
  modified_base 19: mod_base = OTHER; note = 2'-O-methylguanosine-3'-phosphate
  modified_base 20: mod_base = OTHER; note = 2'-O-methyladenosine-3'-phosphate
  modified_base 21: mod_base = OTHER; note = 2'-O-methyluridine-3'-phosphate N-[tris(GalNAc-alkyl)-amidodecanoyl)]-4-hydroxyprolinol Hyp-(GalNAc-alkyl)3
atgttgtcctttttatctgat

SEQ ID NO: 3595 - RNA, 21 nt, synthetic construct
  source 1..21: mol_type = other RNA; note = Description of Artificial Sequence: Synthetic oligonucleotide
  modified_base 1: mod_base = OTHER; note = 2'-O-methyluridine-3'-phosphorothioate
  modified_base 2: mod_base = OTHER; note = 2'-O-methylcytidine-3'-phosphorothioate
  modified_base 3: mod_base = OTHER; note = 2'-O-methyladenosine-3'-phosphate
  modified_base 4: mod_base = OTHER; note = 2'-O-methyladenosine-3'-phosphate
  modified_base 5: mod_base = OTHER; note = 2'-O-methylcytidine-3'-phosphate
  modified_base 6: mod_base = OTHER; note = 2'-O-methyluridine-3'-phosphate
  modified_base 7: mod_base = OTHER; note = 2'-fluorocytidine-3'-phosphate
  modified_base 8: mod_base = OTHER; note = 2'-O-methylcytidine-3'-phosphate
  modified_base 9: mod_base = OTHER; note = 2'-fluorouridine-3'-phosphate
  modified_base 10: mod_base = OTHER; note = 2'-fluoroguanosine-3'-phosphate
  modified_base 11: mod_base = OTHER; note = 2'-fluoroadenosine-3'-phosphate
  modified_base 12: mod_base = OTHER; note = 2'-O-methyladenosine-3'-phosphate
  modified_base 13: mod_base = OTHER; note = 2'-O-methylguanosine-3'-phosphate
  modified_base 14: mod_base = OTHER; note = 2'-O-methyluridine-3'-phosphate
  modified_base 15: mod_base = OTHER; note = 2'-O-methyluridine-3'-phosphate
  modified_base 16: mod_base = OTHER; note = 2'-O-methyladenosine-3'-phosphate
  modified_base 17: mod_base = OTHER; note = 2'-O-methylguanosine-3'-phosphate
  modified_base 18: mod_base = OTHER; note = 2'-O-methyladenosine-3'-phosphate
  modified_base 19: mod_base = OTHER; note = 2'-O-methyladenosine-3'-phosphate
  modified_base 20: mod_base = OTHER; note = 2'-O-methyladenosine-3'-phosphate
  modified_base 21: mod_base = OTHER; note = 2'-O-methyluridine-3'-phosphate N-[tris(GalNAc-alkyl)-amidodecanoyl)]-4-hydroxyprolinol Hyp-(GalNAc-alkyl)3
tcaactcctgaagttagaaat

SEQ ID NO: 3596 - RNA, 21 nt, synthetic construct
  source 1..21: mol_type = other RNA; note = Description of Artificial Sequence: Synthetic oligonucleotide
  modified_base 1: mod_base = OTHER; note = 2'-O-methyladenosine-3'-phosphorothioate
  modified_base 2: mod_base = OTHER; note = 2'-O-methyladenosine-3'-phosphorothioate
  modified_base 3: mod_base = OTHER; note = 2'-O-methylcytidine-3'-phosphate
  modified_base 4: mod_base = OTHER; note = 2'-O-methyluridine-3'-phosphate
  modified_base 5: mod_base = OTHER; note = 2'-O-methyladenosine-3'-phosphate
  modified_base 6: mod_base = OTHER; note = 2'-O-methyluridine-3'-phosphate
  modified_base 7: mod_base = OTHER; note = 2'-fluorocytidine-3'-phosphate
  modified_base 8: mod_base = OTHER; note = 2'-O-methylcytidine-3'-phosphate
  modified_base 9: mod_base = OTHER; note = 2'-fluoroadenosine-3'-phosphate
  modified_base 10: mod_base = OTHER; note = 2'-fluoroadenosine-3'-phosphate
  modified_base 11: mod_base = OTHER; note = 2'-fluoroguanosine-3'-phosphate
  modified_base 12: mod_base = OTHER; note = 2'-O-methyluridine-3'-phosphate
  modified_base 13: mod_base = OTHER; note = 2'-O-methylguanosine-3'-phosphate
  modified_base 14: mod_base = OTHER; note = 2'-O-methyluridine-3'-phosphate
  modified_base 15: mod_base = OTHER; note = 2'-O-methyluridine-3'-phosphate
  modified_base 16: mod_base = OTHER; note = 2'-O-methyladenosine-3'-phosphate
  modified_base 17: mod_base = OTHER; note = 2'-O-methyluridine-3'-phosphate
  modified_base 18: mod_base = OTHER; note = 2'-O-methyladenosine-3'-phosphate
  modified_base 19: mod_base = OTHER; note = 2'-O-methylcytidine-3'-phosphate
  modified_base 20: mod_base = OTHER; note = 2'-O-methylcytidine-3'-phosphate
  modified_base 21: mod_base = OTHER; note = 2'-O-methyladenosine-3'-phosphate N-[tris(GalNAc-alkyl)-amidodecanoyl)]-4-hydroxyprolinol Hyp-(GalNAc-alkyl)3
aactatccaagtgttatacca

SEQ ID NO: 3597 - RNA, 21 nt, synthetic construct
  source 1..21: mol_type = other RNA; note = Description of Artificial Sequence: Synthetic oligonucleotide
  modified_base 1: mod_base = OTHER; note = 2'-O-methyluridine-3'-phosphorothioate
  modified_base 2: mod_base = OTHER; note = 2'-O-methylcytidine-3'-phosphorothioate
  modified_base 3: mod_base = OTHER; note = 2'-O-methylcytidine-3'-phosphate
  modified_base 4: mod_base = OTHER; note = 2'-O-methyluridine-3'-phosphate
  modified_base 5: mod_base = OTHER; note = 2'-O-methyluridine-3'-phosphate
  modified_base 6: mod_base = OTHER; note = 2'-O-methyladenosine-3'-phosphate
  modified_base 7: mod_base = OTHER; note = 2'-fluoroguanosine-3'-phosphate
  modified_base 8: mod_base = OTHER; note = 2'-O-methyladenosine-3'-phosphate
  modified_base 9: mod_base = OTHER; note = 2'-fluoroadenosine-3'-phosphate
  modified_base 10: mod_base = OTHER; note = 2'-fluorocytidine-3'-phosphate
  modified_base 11: mod_base = OTHER; note = 2'-fluoroadenosine-3'-phosphate
  modified_base 12: mod_base = OTHER; note = 2'-O-methylcytidine-3'-phosphate
  modified_base 13: mod_base = OTHER; note = 2'-O-methylcytidine-3'-phosphate
  modified_base 14: mod_base = OTHER; note = 2'-O-methyladenosine-3'-phosphate
  modified_base 15: mod_base = OTHER; note = 2'-O-methyladenosine-3'-phosphate
  modified_base 16: mod_base = OTHER; note = 2'-O-methyladenosine-3'-phosphate
  modified_base 17: mod_base = OTHER; note = 2'-O-methylguanosine-3'-phosphate
  modified_base 18: mod_base = OTHER; note = 2'-O-methyladenosine-3'-phosphate
  modified_base 19: mod_base = OTHER; note = 2'-O-methyluridine-3'-phosphate
  modified_base 20: mod_base = OTHER; note = 2'-O-methyluridine-3'-phosphate
  modified_base 21: mod_base = OTHER; note = 2'-O-methyladenosine-3'-phosphate N-[tris(GalNAc-alkyl)-amidodecanoyl)]-4-hydroxyprolinol Hyp-(GalNAc-alkyl)3
tccttagaacaccaaagatta

SEQ ID NO: 3598 - RNA, 21 nt, synthetic construct
  source 1..21: mol_type = other RNA; note = Description of Artificial Sequence: Synthetic oligonucleotide
  modified_base 1: mod_base = OTHER; note = 2'-O-methylguanosine-3'-phosphorothioate
  modified_base 2: mod_base = OTHER; note = 2'-O-methylguanosine-3'-phosphorothioate
  modified_base 3: mod_base = OTHER; note = 2'-O-methyluridine-3'-phosphate
  modified_base 4: mod_base = OTHER; note = 2'-O-methyladenosine-3'-phosphate
  modified_base 5: mod_base = OTHER; note = 2'-O-methyluridine-3'-phosphate
  modified_base 6: mod_base = OTHER; note = 2'-O-methyluridine-3'-phosphate
  modified_base 7: mod_base = OTHER; note = 2'-fluoroadenosine-3'-phosphate
  modified_base 8: mod_base = OTHER; note = 2'-O-methyladenosine-3'-phosphate
  modified_base 9: mod_base = OTHER; note = 2'-fluorouridine-3'-phosphate
  modified_base 10: mod_base = OTHER; note = 2'-fluorocytidine-3'-phosphate
  modified_base 11: mod_base = OTHER; note = 2'-fluorouridine-3'-phosphate
  modified_base 12: mod_base = OTHER; note = 2'-O-methyluridine-3'-phosphate
  modified_base 13: mod_base = OTHER; note = 2'-O-methylguanosine-3'-phosphate
  modified_base 14: mod_base = OTHER; note = 2'-O-methyluridine-3'-phosphate
  modified_base 15: mod_base = OTHER; note = 2'-O-methylguanosine-3'-phosphate
  modified_base 16: mod_base = OTHER; note = 2'-O-methyluridine-3'-phosphate
  modified_base 17: mod_base = OTHER; note = 2'-O-methyladenosine-3'-phosphate
  modified_base 18: mod_base = OTHER; note = 2'-O-methylguanosine-3'-phosphate
  modified_base 19: mod_base = OTHER; note = 2'-O-methyluridine-3'-phosphate
  modified_base 20: mod_base = OTHER; note = 2'-O-methylcytidine-3'-phosphate
  modified_base 21: mod_base = OTHER; note = 2'-O-methyluridine-3'-phosphate N-[tris(GalNAc-alkyl)-amidodecanoyl)]-4-hydroxyprolinol Hyp-(GalNAc-alkyl)3
ggtattaatcttgtgtagtct

SEQ ID NO: 3599 - RNA, 21 nt, synthetic construct
  source 1..21: mol_type = other RNA; note = Description of Artificial Sequence: Synthetic oligonucleotide
  modified_base 1: mod_base = OTHER; note = 2'-O-methylguanosine-3'-phosphorothioate
  modified_base 2: mod_base = OTHER; note = 2'-O-methylguanosine-3'-phosphorothioate
  modified_base 3: mod_base = OTHER; note = 2'-O-methylcytidine-3'-phosphate
  modified_base 4: mod_base = OTHER; note = 2'-O-methyluridine-3'-phosphate
  modified_base 5: mod_base = OTHER; note = 2'-O-methylcytidine-3'-phosphate
  modified_base 6: mod_base = OTHER; note = 2'-O-methylcytidine-3'-phosphate
  modified_base 7: mod_base = OTHER; note = 2'-fluorouridine-3'-phosphate
  modified_base 8: mod_base = OTHER; note = 2'-O-methyluridine-3'-phosphate
  modified_base 9: mod_base = OTHER; note = 2'-fluorocytidine-3'-phosphate
  modified_base 10: mod_base = OTHER; note = 2'-fluoroadenosine-3'-phosphate
  modified_base 11: mod_base = OTHER; note = 2'-fluorocytidine-3'-phosphate
  modified_base 12: mod_base = OTHER; note = 2'-O-methyluridine-3'-phosphate
  modified_base 13: mod_base = OTHER; note = 2'-O-methylguanosine-3'-phosphate
  modified_base 14: mod_base = OTHER; note = 2'-O-methyladenosine-3'-phosphate
  modified_base 15: mod_base = OTHER; note = 2'-O-methyladenosine-3'-phosphate
  modified_base 16: mod_base = OTHER; note = 2'-O-methylcytidine-3'-phosphate
  modified_base 17: mod_base = OTHER; note = 2'-O-methyladenosine-3'-phosphate
  modified_base 18: mod_base = OTHER; note = 2'-O-methyluridine-3'-phosphate
  modified_base 19: mod_base = OTHER; note = 2'-O-methylguanosine-3'-phosphate
  modified_base 20: mod_base = OTHER; note = 2'-O-methylcytidine-3'-phosphate
  modified_base 21: mod_base = OTHER; note = 2'-O-methyladenosine-3'-phosphate N-[tris(GalNAc-alkyl)-amidodecanoyl)]-4-hydroxyprolinol Hyp-(GalNAc-alkyl)3
ggctccttcactgaacatgca

SEQ ID NO: 3600 - RNA, 21 nt, synthetic construct
  source 1..21: mol_type = other RNA; note = Description of Artificial Sequence: Synthetic oligonucleotide
  modified_base 1: mod_base = OTHER; note = 2'-O-methyluridine-3'-phosphorothioate
  modified_base 2: mod_base = OTHER; note = 2'-O-methyladenosine-3'-phosphorothioate
  modified_base 3: mod_base = OTHER; note = 2'-O-methyluridine-3'-phosphate
  modified_base 4: mod_base = OTHER; note = 2'-O-methylcytidine-3'-phosphate
  modified_base 5: mod_base = OTHER; note = 2'-O-methyladenosine-3'-phosphate
  modified_base 6: mod_base = OTHER; note = 2'-O-methylguanosine-3'-phosphate
  modified_base 7: mod_base = OTHER; note = 2'-fluorouridine-3'-phosphate
  modified_base 8: mod_base = OTHER; note = 2'-O-methyladenosine-3'-phosphate
  modified_base 9: mod_base = OTHER; note = 2'-fluoroguanosine-3'-phosphate
  modified_base 10: mod_base = OTHER; note = 2'-fluorouridine-3'-phosphate
  modified_base 11: mod_base = OTHER; note = 2'-fluoroguanosine-3'-phosphate
  modified_base 12: mod_base = OTHER; note = 2'-O-methyluridine-3'-phosphate
  modified_base 13: mod_base = OTHER; note = 2'-O-methyladenosine-3'-phosphate
  modified_base 14: mod_base = OTHER; note = 2'-O-methylcytidine-3'-phosphate
  modified_base 15: mod_base = OTHER; note = 2'-O-methyladenosine-3'-phosphate
  modified_base 16: mod_base = OTHER; note = 2'-O-methyluridine-3'-phosphate
  modified_base 17: mod_base = OTHER; note = 2'-O-methyluridine-3'-phosphate
  modified_base 18: mod_base = OTHER; note = 2'-O-methyladenosine-3'-phosphate
  modified_base 19: mod_base = OTHER; note = 2'-O-methylcytidine-3'-phosphate
  modified_base 20: mod_base = OTHER; note = 2'-O-methylcytidine-3'-phosphate
  modified_base 21: mod_base = OTHER; note = 2'-O-methyladenosine-3'-phosphate N-[tris(GalNAc-alkyl)-amidodecanoyl)]-4-hydroxyprolinol Hyp-(GalNAc-alkyl)3
tatcagtagtgtacattacca

SEQ ID NO: 3601 - RNA, 21 nt, synthetic construct
  source 1..21: mol_type = other RNA; note = Description of Artificial Sequence: Synthetic oligonucleotide
  modified_base 1: mod_base = OTHER; note = 2'-O-methylcytidine-3'-phosphorothioate
  modified_base 2: mod_base = OTHER; note = 2'-O-methyladenosine-3'-phosphorothioate
  modified_base 3: mod_base = OTHER; note = 2'-O-methylguanosine-3'-phosphate
  modified_base 4: mod_base = OTHER; note = 2'-O-methylcytidine-3'-phosphate
  modified_base 5: mod_base = OTHER; note = 2'-O-methylcytidine-3'-phosphate
  modified_base 6: mod_base = OTHER; note = 2'-O-methyluridine-3'-phosphate
  modified_base 7: mod_base = OTHER; note = 2'-fluorouridine-3'-phosphate
  modified_base 8: mod_base = OTHER; note = 2'-O-methyluridine-3'-phosphate
  modified_base 9: mod_base = OTHER; note = 2'-fluorouridine-3'-phosphate
  modified_base 10: mod_base = OTHER; note = 2'-fluorocytidine-3'-phosphate
  modified_base 11: mod_base = OTHER; note = 2'-fluorocytidine-3'-phosphate
  modified_base 12: mod_base = OTHER; note = 2'-O-methyluridine-3'-phosphate
  modified_base 13: mod_base = OTHER; note = 2'-O-methyluridine-3'-phosphate
  modified_base 14: mod_base = OTHER; note = 2'-O-methyladenosine-3'-phosphate
  modified_base 15: mod_base = OTHER; note = 2'-O-methylguanosine-3'-phosphate
  modified_base 16: mod_base = OTHER; note = 2'-O-methyladenosine-3'-phosphate
  modified_base 17: mod_base = OTHER; note = 2'-O-methyladenosine-3'-phosphate
  modified_base 18: mod_base = OTHER; note = 2'-O-methylcytidine-3'-phosphate
  modified_base 19: mod_base = OTHER; note = 2'-O-methyladenosine-3'-phosphate
  modified_base 20: mod_base = OTHER; note = 2'-O-methylcytidine-3'-phosphate
  modified_base 21: mod_base = OTHER; note = 2'-O-methyladenosine-3'-phosphate N-[tris(GalNAc-alkyl)-amidodecanoyl)]-4-hydroxyprolinol Hyp-(GalNAc-alkyl)3
cagccttttccttagaacaca

SEQ ID NO: 3602 - RNA, 21 nt, synthetic construct
  source 1..21: mol_type = other RNA; note = Description of Artificial Sequence: Synthetic oligonucleotide
  modified_base 1: mod_base = OTHER; note = 2'-O-methylcytidine-3'-phosphorothioate
  modified_base 2: mod_base = OTHER; note = 2'-O-methyluridine-3'-phosphorothioate
  modified_base 3: mod_base = OTHER; note = 2'-O-methylguanosine-3'-phosphate
  modified_base 4: mod_base = OTHER; note = 2'-O-methylguanosine-3'-phosphate
  modified_base 5: mod_base = OTHER; note = 2'-O-methyluridine-3'-phosphate
  modified_base 6: mod_base = OTHER; note = 2'-O-methyluridine-3'-phosphate
  modified_base 7: mod_base = OTHER; note = 2'-fluoroadenosine-3'-phosphate
  modified_base 8: mod_base = OTHER; note = 2'-O-methylguanosine-3'-phosphate
  modified_base 9: mod_base = OTHER; note = 2'-fluorouridine-3'-phosphate
  modified_base 10: mod_base = OTHER; note = 2'-fluoroguanosine-3'-phosphate
  modified_base 11: mod_base = OTHER; note = 2'-fluorouridine-3'-phosphate
  modified_base 12: mod_base = OTHER; note = 2'-O-methylguanosine-3'-phosphate
  modified_base 13: mod_base = OTHER; note = 2'-O-methyladenosine-3'-phosphate
  modified_base 14: mod_base = OTHER; note = 2'-O-methyladenosine-3'-phosphate
  modified_base 15: mod_base = OTHER; note = 2'-O-methyladenosine-3'-phosphate
  modified_base 16: mod_base = OTHER; note = 2'-O-methyluridine-3'-phosphate
  modified_base 17: mod_base = OTHER; note = 2'-O-methyladenosine-3'-phosphate
  modified_base 18: mod_base = OTHER; note = 2'-O-methylguanosine-3'-phosphate
  modified_base 19: mod_base = OTHER; note = 2'-O-methyluridine-3'-phosphate
  modified_base 20: mod_base = OTHER; note = 2'-O-methyluridine-3'-phosphate
  modified_base 21: mod_base = OTHER; note = 2'-O-methyladenosine-3'-phosphate N-[tris(GalNAc-alkyl)-amidodecanoyl)]-4-hydroxyprolinol Hyp-(GalNAc-alkyl)3
ctggttagtgtgaaatagtta

SEQ ID NO: 3603 - RNA, 21 nt, synthetic construct
  source 1..21: mol_type = other RNA; note = Description of Artificial Sequence: Synthetic oligonucleotide
  modified_base 1: mod_base = OTHER; note = 2'-O-methyladenosine-3'-phosphorothioate
  modified_base 2: mod_base = OTHER; note = 2'-O-methylcytidine-3'-phosphorothioate
  modified_base 3: mod_base = OTHER; note = 2'-O-methyluridine-3'-phosphate
  modified_base 4: mod_base = OTHER; note = 2'-O-methyladenosine-3'-phosphate
  modified_base 5: mod_base = OTHER; note = 2'-O-methyluridine-3'-phosphate
  modified_base 6: mod_base = OTHER; note = 2'-O-methyladenosine-3'-phosphate
  modified_base 7: mod_base = OTHER; note = 2'-fluorouridine-3'-phosphate
  modified_base 8: mod_base = OTHER; note = 2'-O-methylcytidine-3'-phosphate
  modified_base 9: mod_base = OTHER; note = 2'-fluoroadenosine-3'-phosphate
  modified_base 10: mod_base = OTHER; note = 2'-fluoroguanosine-3'-phosphate
  modified_base 11: mod_base = OTHER; note = 2'-fluorouridine-3'-phosphate
  modified_base 12: mod_base = OTHER; note = 2'-O-methyladenosine-3'-phosphate
  modified_base 13: mod_base = OTHER; note = 2'-O-methylguanosine-3'-phosphate
  modified_base 14: mod_base = OTHER; note = 2'-O-methyluridine-3'-phosphate
  modified_base 15: mod_base = OTHER; note = 2'-O-methylguanosine-3'-phosphate
  modified_base 16: mod_base = OTHER; note = 2'-O-methyluridine-3'-phosphate
  modified_base 17: mod_base = OTHER; note = 2'-O-methyladenosine-3'-phosphate
  modified_base 18: mod_base = OTHER; note = 2'-O-methylcytidine-3'-phosphate
  modified_base 19: mod_base = OTHER; note = 2'-O-methyladenosine-3'-phosphate
  modified_base 20: mod_base = OTHER; note = 2'-O-methyluridine-3'-phosphate
  modified_base 21: mod_base = OTHER; note = 2'-O-methyluridine-3'-phosphate N-[tris(GalNAc-alkyl)-amidodecanoyl)]-4-hydroxyprolinol Hyp-(GalNAc-alkyl)3
actatatcagtagtgtacatt

SEQ ID NO: 3604 - RNA, 21 nt, synthetic construct
  source 1..21: mol_type = other RNA; note = Description of Artificial Sequence: Synthetic oligonucleotide
  modified_base 1: mod_base = OTHER; note = 2'-O-methyluridine-3'-phosphorothioate
  modified_base 2: mod_base = OTHER; note = 2'-O-methyladenosine-3'-phosphorothioate
  modified_base 3: mod_base = OTHER; note = 2'-O-methyluridine-3'-phosphate
  modified_base 4: mod_base = OTHER; note = 2'-O-methyladenosine-3'-phosphate
  modified_base 5: mod_base = OTHER; note = 2'-O-methyluridine-3'-phosphate
  modified_base 6: mod_base = OTHER; note = 2'-O-methylcytidine-3'-phosphate
  modified_base 7: mod_base = OTHER; note = 2'-fluoroadenosine-3'-phosphate
  modified_base 8: mod_base = OTHER; note = 2'-O-methylguanosine-3'-phosphate
  modified_base 9: mod_base = OTHER; note = 2'-fluorouridine-3'-phosphate
  modified_base 10: mod_base = OTHER; note = 2'-fluoroadenosine-3'-phosphate
  modified_base 11: mod_base = OTHER; note = 2'-fluoroguanosine-3'-phosphate
  modified_base 12: mod_base = OTHER; note = 2'-O-methyluridine-3'-phosphate
  modified_base 13: mod_base = OTHER; note = 2'-O-methylguanosine-3'-phosphate
  modified_base 14: mod_base = OTHER; note = 2'-O-methyluridine-3'-phosphate
  modified_base 15: mod_base = OTHER; note = 2'-O-methyladenosine-3'-phosphate
  modified_base 16: mod_base = OTHER; note = 2'-O-methylcytidine-3'-phosphate
  modified_base 17: mod_base = OTHER; note = 2'-O-methyladenosine-3'-phosphate
  modified_base 18: mod_base = OTHER; note = 2'-O-methyluridine-3'-phosphate
  modified_base 19: mod_base = OTHER; note = 2'-O-methyluridine-3'-phosphate
  modified_base 20: mod_base = OTHER; note = 2'-O-methyladenosine-3'-phosphate
  modified_base 21: mod_base = OTHER; note = 2'-O-methyladenosine-3'-phosphate N-[tris(GalNAc-alkyl)-amidodecanoyl)]-4-hydroxyprolinol Hyp-(GalNAc-alkyl)3
tatatcagtagtgtacattaa

SEQ ID NO: 3605 - RNA, 21 nt, synthetic construct
  source 1..21: mol_type = other RNA; note = Description of Artificial Sequence: Synthetic oligonucleotide
  modified_base 1: mod_base = OTHER; note = 2'-O-methylguanosine-3'-phosphorothioate
  modified_base 2: mod_base = OTHER; note = 2'-O-methyluridine-3'-phosphorothioate
  modified_base 3: mod_base = OTHER; note = 2'-O-methyladenosine-3'-phosphate
  modified_base 4: mod_base = OTHER; note = 2'-O-methyladenosine-3'-phosphate
  modified_base 5: mod_base = OTHER; note = 2'-O-methyluridine-3'-phosphate
  modified_base 6: mod_base = OTHER; note = 2'-O-methyladenosine-3'-phosphate
  modified_base 7: mod_base = OTHER; note = 2'-fluorouridine-3'-phosphate
  modified_base 8: mod_base = OTHER; note = 2'-O-methyluridine-3'-phosphate
  modified_base 9: mod_base = OTHER; note = 2'-fluorouridine-3'-phosphate
  modified_base 10: mod_base = OTHER; note = 2'-fluorouridine-3'-phosphate
  modified_base 11: mod_base = OTHER; note = 2'-fluoroadenosine-3'-phosphate
  modified_base 12: mod_base = OTHER; note = 2'-O-methyladenosine-3'-phosphate
  modified_base 13: mod_base = OTHER; note = 2'-O-methylguanosine-3'-phosphate
  modified_base 14: mod_base = OTHER; note = 2'-O-methyladenosine-3'-phosphate
  modified_base 15: mod_base = OTHER; note = 2'-O-methyluridine-3'-phosphate
  modified_base 16: mod_base = OTHER; note = 2'-O-methylguanosine-3'-phosphate
  modified_base 17: mod_base = OTHER; note = 2'-O-methylguanosine-3'-phosphate
  modified_base 18: mod_base = OTHER; note = 2'-O-methyladenosine-3'-phosphate
  modified_base 19: mod_base = OTHER; note = 2'-O-methylcytidine-3'-phosphate
  modified_base 20: mod_base = OTHER; note = 2'-O-methyluridine-3'-phosphate
  modified_base 21: mod_base = OTHER; note = 2'-O-methyladenosine-3'-phosphate N-[tris(GalNAc-alkyl)-amidodecanoyl)]-4-hydroxyprolinol Hyp-(GalNAc-alkyl)3
gtaatattttaagatggacta

SEQ ID NO: 3606 - RNA, 21 nt, synthetic construct
  source 1..21: mol_type = other RNA; note = Description of Artificial Sequence: Synthetic oligonucleotide
  modified_base 1: mod_base = OTHER; note = 2'-O-methyluridine-3'-phosphorothioate
  modified_base 2: mod_base = OTHER; note = 2'-O-methyluridine-3'-phosphorothioate
  modified_base 3: mod_base = OTHER; note = 2'-O-methyluridine-3'-phosphate
  modified_base 4: mod_base = OTHER; note = 2'-O-methyluridine-3'-phosphate
  modified_base 5: mod_base = OTHER; note = 2'-O-methyladenosine-3'-phosphate
  modified_base 6: mod_base = OTHER; note = 2'-O-methyladenosine-3'-phosphate
  modified_base 7: mod_base = OTHER; note = 2'-fluoroguanosine-3'-phosphate
  modified_base 8: mod_base = OTHER; note = 2'-O-methyladenosine-3'-phosphate
  modified_base 9: mod_base = OTHER; note = 2'-fluorouridine-3'-phosphate
  modified_base 10: mod_base = OTHER; note = 2'-fluoroguanosine-3'-phosphate
  modified_base 11: mod_base = OTHER; note = 2'-fluoroguanosine-3'-phosphate
  modified_base 12: mod_base = OTHER; note = 2'-O-methyladenosine-3'-phosphate
  modified_base 13: mod_base = OTHER; note = 2'-O-methylcytidine-3'-phosphate
  modified_base 14: mod_base = OTHER; note = 2'-O-methyluridine-3'-phosphate
  modified_base 15: mod_base = OTHER; note = 2'-O-methylguanosine-3'-phosphate
  modified_base 16: mod_base = OTHER; note = 2'-O-methylguanosine-3'-phosphate
  modified_base 17: mod_base = OTHER; note = 2'-O-methylguanosine-3'-phosphate
  modified_base 18: mod_base = OTHER; note = 2'-O-methyladenosine-3'-phosphate
  modified_base 19: mod_base = OTHER; note = 2'-O-methyladenosine-3'-phosphate
  modified_base 20: mod_base = OTHER; note = 2'-O-methyladenosine-3'-phosphate
  modified_base 21: mod_base = OTHER; note = 2'-O-methyladenosine-3'-phosphate N-[tris(GalNAc-alkyl)-amidodecanoyl)]-4-hydroxyprolinol Hyp-(GalNAc-alkyl)3
ttttaagatggactgggaaaa

SEQ ID NO: 3607 - RNA, 21 nt, synthetic construct
  source 1..21: mol_type = other RNA; note = Description of Artificial Sequence: Synthetic oligonucleotide
  modified_base 1: mod_base = OTHER; note = 2'-O-methyluridine-3'-phosphorothioate
  modified_base 2: mod_base = OTHER; note = 2'-O-methylguanosine-3'-phosphorothioate
  modified_base 3: mod_base = OTHER; note = 2'-O-methylguanosine-3'-phosphate
  modified_base 4: mod_base = OTHER; note = 2'-O-methyluridine-3'-phosphate
  modified_base 5: mod_base = OTHER; note = 2'-O-methyluridine-3'-phosphate
  modified_base 6: mod_base = OTHER; note = 2'-O-methyladenosine-3'-phosphate
  modified_base 7: mod_base = OTHER; note = 2'-fluoroguanosine-3'-phosphate
  modified_base 8: mod_base = OTHER; note = 2'-O-methyluridine-3'-phosphate
  modified_base 9: mod_base = OTHER; note = 2'-fluoroguanosine-3'-phosphate
  modified_base 10: mod_base = OTHER; note = 2'-fluorouridine-3'-phosphate
  modified_base 11: mod_base = OTHER; note = 2'-fluoroguanosine-3'-phosphate
  modified_base 12: mod_base = OTHER; note = 2'-O-methyladenosine-3'-phosphate
  modified_base 13: mod_base = OTHER; note = 2'-O-methyladenosine-3'-phosphate
  modified_base 14: mod_base = OTHER; note = 2'-O-methyladenosine-3'-phosphate
  modified_base 15: mod_base = OTHER; note = 2'-O-methyluridine-3'-phosphate
  modified_base 16: mod_base = OTHER; note = 2'-O-methyladenosine-3'-phosphate
  modified_base 17: mod_base = OTHER; note = 2'-O-methylguanosine-3'-phosphate
  modified_base 18: mod_base = OTHER; note = 2'-O-methyluridine-3'-phosphate
  modified_base 19: mod_base = OTHER; note = 2'-O-methyluridine-3'-phosphate
  modified_base 20: mod_base = OTHER; note = 2'-O-methylcytidine-3'-phosphate
  modified_base 21: mod_base = OTHER; note = 2'-O-methyluridine-3'-phosphate N-[tris(GalNAc-alkyl)-amidodecanoyl)]-4-hydroxyprolinol Hyp-(GalNAc-alkyl)3
tggttagtgtgaaatagttct

SEQ ID NO: 3608 - RNA, 21 nt, synthetic construct
  source 1..21: mol_type = other RNA; note = Description of Artificial Sequence: Synthetic oligonucleotide
  modified_base 1: mod_base = OTHER; note = 2'-O-methyluridine-3'-phosphorothioate
  modified_base 2: mod_base = OTHER; note = 2'-O-methyluridine-3'-phosphorothioate
  modified_base 3: mod_base = OTHER; note = 2'-O-methylcytidine-3'-phosphate
  modified_base 4: mod_base = OTHER; note = 2'-O-methyladenosine-3'-phosphate
  modified_base 5: mod_base = OTHER; note = 2'-O-methylcytidine-3'-phosphate
  modified_base 6: mod_base = OTHER; note = 2'-O-methyluridine-3'-phosphate
  modified_base 7: mod_base = OTHER; note = 2'-fluoroguanosine-3'-phosphate
  modified_base 8: mod_base = OTHER; note = 2'-O-methyladenosine-3'-phosphate
  modified_base 9: mod_base = OTHER; note = 2'-fluoroadenosine-3'-phosphate
  modified_base 10: mod_base = OTHER; note = 2'-fluorocytidine-3'-phosphate
  modified_base 11: mod_base = OTHER; note = 2'-fluoroadenosine-3'-phosphate
  modified_base 12: mod_base = OTHER; note = 2'-O-methyluridine-3'-phosphate
  modified_base 13: mod_base = OTHER; note = 2'-O-methylguanosine-3'-phosphate
  modified_base 14: mod_base = OTHER; note = 2'-O-methylcytidine-3'-phosphate
  modified_base 15: mod_base = OTHER; note = 2'-O-methylcytidine-3'-phosphate
  modified_base 16: mod_base = OTHER; note = 2'-O-methyluridine-3'-phosphate
  modified_base 17: mod_base = OTHER; note = 2'-O-methyladenosine-3'-phosphate
  modified_base 18: mod_base = OTHER; note = 2'-O-methylguanosine-3'-phosphate
  modified_base 19: mod_base = OTHER; note = 2'-O-methyluridine-3'-phosphate
  modified_base 20: mod_base = OTHER; note = 2'-O-methylcytidine-3'-phosphate
  modified_base 21: mod_base = OTHER; note = 2'-O-methyladenosine-3'-phosphate N-[tris(GalNAc-alkyl)-amidodecanoyl)]-4-hydroxyprolinol Hyp-(GalNAc-alkyl)3
ttcactgaacatgcctagtca

SEQ ID NO: 3609 - RNA, 21 nt, synthetic construct
  source 1..21: mol_type = other RNA; note = Description of Artificial Sequence: Synthetic oligonucleotide
  modified_base 1: mod_base = OTHER; note = 2'-O-methyladenosine-3'-phosphorothioate
  modified_base 2: mod_base = OTHER; note = 2'-O-methylcytidine-3'-phosphorothioate
  modified_base 3: mod_base = OTHER; note = 2'-O-methylcytidine-3'-phosphate
  modified_base 4: mod_base = OTHER; note = 2'-O-methyladenosine-3'-phosphate
  modified_base 5: mod_base = OTHER; note = 2'-O-methyladenosine-3'-phosphate
  modified_base 6: mod_base = OTHER; note = 2'-O-methylcytidine-3'-phosphate
  modified_base 7: mod_base = OTHER; note = 2'-fluorouridine-3'-phosphate
  modified_base 8: mod_base = OTHER; note = 2'-O-methyladenosine-3'-phosphate
  modified_base 9: mod_base = OTHER; note = 2'-fluorouridine-3'-phosphate
  modified_base 10: mod_base = OTHER; note = 2'-fluorocytidine-3'-phosphate
  modified_base 11: mod_base = OTHER; note = 2'-fluorocytidine-3'-phosphate
  modified_base 12: mod_base = OTHER; note = 2'-O-methyladenosine-3'-phosphate
  modified_base 13: mod_base = OTHER; note = 2'-O-methyladenosine-3'-phosphate
  modified_base 14: mod_base = OTHER; note = 2'-O-methylguanosine-3'-phosphate
  modified_base 15: mod_base = OTHER; note = 2'-O-methyluridine-3'-phosphate
  modified_base 16: mod_base = OTHER; note = 2'-O-methylguanosine-3'-phosphate
  modified_base 17: mod_base = OTHER; note = 2'-O-methyluridine-3'-phosphate
  modified_base 18: mod_base = OTHER; note = 2'-O-methyluridine-3'-phosphate
  modified_base 19: mod_base = OTHER; note = 2'-O-methyladenosine-3'-phosphate
  modified_base 20: mod_base = OTHER; note = 2'-O-methyluridine-3'-phosphate
  modified_base 21: mod_base = OTHER; note = 2'-O-methyladenosine-3'-phosphate N-[tris(GalNAc-alkyl)-amidodecanoyl)]-4-hydroxyprolinol Hyp-(GalNAc-alkyl)3
accaactatccaagtgttata

SEQ ID NO: 3610 - RNA, 21 nt, synthetic construct
  source 1..21: mol_type = other RNA; note = Description of Artificial Sequence: Synthetic oligonucleotide
  modified_base 1: mod_base = OTHER; note = 2'-O-methylcytidine-3'-phosphorothioate
  modified_base 2: mod_base = OTHER; note = 2'-O-methylcytidine-3'-phosphorothioate
  modified_base 3: mod_base = OTHER; note = 2'-O-methyladenosine-3'-phosphate
  modified_base 4: mod_base = OTHER; note = 2'-O-methyladenosine-3'-phosphate
  modified_base 5: mod_base = OTHER; note = 2'-O-methylguanosine-3'-phosphate
  modified_base 6: mod_base = OTHER; note = 2'-O-methyluridine-3'-phosphate
  modified_base 7: mod_base = OTHER; note = 2'-fluoroguanosine-3'-phosphate
  modified_base 8: mod_base = OTHER; note = 2'-O-methyluridine-3'-phosphate
  modified_base 9: mod_base = OTHER; note = 2'-fluorouridine-3'-phosphate
  modified_base 10: mod_base = OTHER; note = 2'-fluoroadenosine-3'-phosphate
  modified_base 11: mod_base = OTHER; note = 2'-fluorouridine-3'-phosphate
  modified_base 12: mod_base = OTHER; note = 2'-O-methyladenosine-3'-phosphate
  modified_base 13: mod_base = OTHER; note = 2'-O-methylcytidine-3'-phosphate
  modified_base 14: mod_base = OTHER; note = 2'-O-methylcytidine-3'-phosphate
  modified_base 15: mod_base = OTHER; note = 2'-O-methyladenosine-3'-phosphate
  modified_base 16: mod_base = OTHER; note = 2'-O-methyladenosine-3'-phosphate
  modified_base 17: mod_base = OTHER; note = 2'-O-methylcytidine-3'-phosphate
  modified_base 18: mod_base = OTHER; note = 2'-O-methyluridine-3'-phosphate
  modified_base 19: mod_base = OTHER; note = 2'-O-methyladenosine-3'-phosphate
  modified_base 20: mod_base = OTHER; note = 2'-O-methyladenosine-3'-phosphate
  modified_base 21: mod_base = OTHER; note = 2'-O-methyladenosine-3'-phosphate N-[tris(GalNAc-alkyl)-amidodecanoyl)]-4-hydroxyprolinol Hyp-(GalNAc-alkyl)3
ccaagtgttataccaactaaa

SEQ ID NO: 3611 - RNA, 21 nt, synthetic construct
  source 1..21: mol_type = other RNA; note = Description of Artificial Sequence: Synthetic oligonucleotide
  modified_base 1: mod_base = OTHER; note = 2'-O-methyluridine-3'-phosphorothioate
  modified_base 2: mod_base = OTHER; note = 2'-O-methyluridine-3'-phosphorothioate
  modified_base 3: mod_base = OTHER; note = 2'-O-methylcytidine-3'-phosphate
  modified_base 4: mod_base = OTHER; note = 2'-O-methylcytidine-3'-phosphate
  modified_base 5: mod_base = OTHER; note = 2'-O-methyluridine-3'-phosphate
  modified_base 6: mod_base = OTHER; note = 2'-O-methyluridine-3'-phosphate
  modified_base 7: mod_base = OTHER; note = 2'-fluorouridine-3'-phosphate
  modified_base 8: mod_base = OTHER; note = 2'-O-methyluridine-3'-phosphate
  modified_base 9: mod_base = OTHER; note = 2'-fluoroguanosine-3'-phosphate
  modified_base 10: mod_base = OTHER; note = 2'-fluoroguanosine-3'-phosphate
  modified_base 11: mod_base = OTHER; note = 2'-fluorouridine-3'-phosphate
  modified_base 12: mod_base = OTHER; note = 2'-O-methyluridine-3'-phosphate
  modified_base 13: mod_base = OTHER; note = 2'-O-methylcytidine-3'-phosphate
  modified_base 14: mod_base = OTHER; note = 2'-O-methylcytidine-3'-phosphate
  modified_base 15: mod_base = OTHER; note = 2'-O-methyladenosine-3'-phosphate
  modified_base 16: mod_base = OTHER; note = 2'-O-methyladenosine-3'-phosphate
  modified_base 17: mod_base = OTHER; note = 2'-O-methylguanosine-3'-phosphate
  modified_base 18: mod_base = OTHER; note = 2'-O-methyluridine-3'-phosphate
  modified_base 19: mod_base = OTHER; note = 2'-O-methylcytidine-3'-phosphate
  modified_base 20: mod_base = OTHER; note = 2'-O-methylcytidine-3'-phosphate
  modified_base 21: mod_base = OTHER; note = 2'-O-methyladenosine-3'-phosphate N-[tris(GalNAc-alkyl)-amidodecanoyl)]-4-hydroxyprolinol Hyp-(GalNAc-alkyl)3
ttccttttggttccaagtcca

SEQ ID NO: 3612 - RNA, 21 nt, synthetic construct
  source 1..21: mol_type = other RNA; note = Description of Artificial Sequence: Synthetic oligonucleotide
  modified_base 1: mod_base = OTHER; note = 2'-O-methylguanosine-3'-phosphorothioate
  modified_base 2: mod_base = OTHER; note = 2'-O-methylcytidine-3'-phosphorothioate
  modified_base 3: mod_base = OTHER; note = 2'-O-methyladenosine-3'-phosphate
  modified_base 4: mod_base = OTHER; note = 2'-O-methylguanosine-3'-phosphate
  modified_base 5: mod_base = OTHER; note = 2'-O-methylcytidine-3'-phosphate
  modified_base 6: mod_base = OTHER; note = 2'-O-methylcytidine-3'-phosphate
  modified_base 7: mod_base = OTHER; note = 2'-fluorouridine-3'-phosphate
  modified_base 8: mod_base = OTHER; note = 2'-O-methyluridine-3'-phosphate
  modified_base 9: mod_base = OTHER; note = 2'-fluorouridine-3'-phosphate
  modified_base 10: mod_base = OTHER; note = 2'-fluorouridine-3'-phosphate
  modified_base 11: mod_base = OTHER; note = 2'-fluorocytidine-3'-phosphate
  modified_base 12: mod_base = OTHER; note = 2'-O-methylcytidine-3'-phosphate
  modified_base 13: mod_base = OTHER; note = 2'-O-methyluridine-3'-phosphate
  modified_base 14: mod_base = OTHER; note = 2'-O-methyluridine-3'-phosphate
  modified_base 15: mod_base = OTHER; note = 2'-O-methyladenosine-3'-phosphate
  modified_base 16: mod_base = OTHER; note = 2'-O-methylguanosine-3'-phosphate
  modified_base 17: mod_base = OTHER; note = 2'-O-methyladenosine-3'-phosphate
  modified_base 18: mod_base = OTHER; note = 2'-O-methyladenosine-3'-phosphate
  modified_base 19: mod_base = OTHER; note = 2'-O-methylcytidine-3'-phosphate
  modified_base 20: mod_base = OTHER; note = 2'-O-methyladenosine-3'-phosphate
  modified_base 21: mod_base = OTHER; note = 2'-O-methyladenosine-3'-phosphate N-[tris(GalNAc-alkyl)-amidodecanoyl)]-4-hydroxyprolinol Hyp-(GalNAc-alkyl)3
gcagccttttccttagaacaa

SEQ ID NO: 3613 - RNA, 21 nt, synthetic construct
  source 1..21: mol_type = other RNA; note = Description of Artificial Sequence: Synthetic oligonucleotide
  modified_base 1: mod_base = OTHER; note = 2'-O-methyladenosine-3'-phosphorothioate
  modified_base 2: mod_base = OTHER; note = 2'-O-methylguanosine-3'-phosphorothioate
  modified_base 3: mod_base = OTHER; note = 2'-O-methyluridine-3'-phosphate
  modified_base 4: mod_base = OTHER; note = 2'-O-methyladenosine-3'-phosphate
  modified_base 5: mod_base = OTHER; note = 2'-O-methyladenosine-3'-phosphate
  modified_base 6: mod_base = OTHER; note = 2'-O-methyluridine-3'-phosphate
  modified_base 7: mod_base = OTHER; note = 2'-fluoroadenosine-3'-phosphate
  modified_base 8: mod_base = OTHER; note = 2'-O-methyluridine-3'-phosphate
  modified_base 9: mod_base = OTHER; note = 2'-fluorouridine-3'-phosphate
  modified_base 10: mod_base = OTHER; note = 2'-fluorouridine-3'-phosphate
  modified_base 11: mod_base = OTHER; note = 2'-fluorouridine-3'-phosphate
  modified_base 12: mod_base = OTHER; note = 2'-O-methyladenosine-3'-phosphate
  modified_base 13: mod_base = OTHER; note = 2'-O-methyladenosine-3'-phosphate
  modified_base 14: mod_base = OTHER; note = 2'-O-methylguanosine-3'-phosphate
  modified_base 15: mod_base = OTHER; note = 2'-O-methyladenosine-3'-phosphate
  modified_base 16: mod_base = OTHER; note = 2'-O-methyluridine-3'-phosphate
  modified_base 17: mod_base = OTHER; note = 2'-O-methylguanosine-3'-phosphate
  modified_base 18: mod_base = OTHER; note = 2'-O-methylguanosine-3'-phosphate
  modified_base 19: mod_base = OTHER; note = 2'-O-methyladenosine-3'-phosphate
  modified_base 20: mod_base = OTHER; note = 2'-O-methylcytidine-3'-phosphate
  modified_base 21: mod_base = OTHER; note = 2'-O-methyluridine-3'-phosphate N-[tris(GalNAc-alkyl)-amidodecanoyl)]-4-hydroxyprolinol Hyp-(GalNAc-alkyl)3
agtaatattttaagatggact

SEQ ID NO: 3614 - RNA, 21 nt, synthetic construct
  source 1..21: mol_type = other RNA; note = Description of Artificial Sequence: Synthetic oligonucleotide
  modified_base 1: mod_base = OTHER; note = 2'-O-methyladenosine-3'-phosphorothioate
  modified_base 2: mod_base = OTHER; note = 2'-O-methyladenosine-3'-phosphorothioate
  modified_base 3: mod_base = OTHER; note = 2'-O-methyladenosine-3'-phosphate
  modified_base 4: mod_base = OTHER; note = 2'-O-methyladenosine-3'-phosphate
  modified_base 5: mod_base = OTHER; note = 2'-O-methyluridine-3'-phosphate
  modified_base 6: mod_base = OTHER; note = 2'-O-methylcytidine-3'-phosphate
  modified_base 7: mod_base = OTHER; note = 2'-fluorocytidine-3'-phosphate
  modified_base 8: mod_base = OTHER; note = 2'-O-methyladenosine-3'-phosphate
  modified_base 9: mod_base = OTHER; note = 2'-fluorocytidine-3'-phosphate
  modified_base 10: mod_base = OTHER; note = 2'-fluoroadenosine-3'-phosphate
  modified_base 11: mod_base = OTHER; note = 2'-fluoroguanosine-3'-phosphate
  modified_base 12: mod_base = OTHER; note = 2'-O-methylcytidine-3'-phosphate
  modified_base 13: mod_base = OTHER; note = 2'-O-methyluridine-3'-phosphate
  modified_base 14: mod_base = OTHER; note = 2'-O-methyladenosine-3'-phosphate
  modified_base 15: mod_base = OTHER; note = 2'-O-methyluridine-3'-phosphate
  modified_base 16: mod_base = OTHER; note = 2'-O-methyladenosine-3'-phosphate
  modified_base 17: mod_base = OTHER; note = 2'-O-methyluridine-3'-phosphate
  modified_base 18: mod_base = OTHER; note = 2'-O-methylcytidine-3'-phosphate
  modified_base 19: mod_base = OTHER; note = 2'-O-methylcytidine-3'-phosphate
  modified_base 20: mod_base = OTHER; note = 2'-O-methyluridine-3'-phosphate
  modified_base 21: mod_base = OTHER; note = 2'-O-methyladenosine-3'-phosphate N-[tris(GalNAc-alkyl)-amidodecanoyl)]-4-hydroxyprolinol Hyp-(GalNAc-alkyl)3
aaaatccacagctatatccta

SEQ ID NO: 3615 - RNA, 21 nt, synthetic construct
  source 1..21: mol_type = other RNA; note = Description of Artificial Sequence: Synthetic oligonucleotide
  modified_base 1: mod_base = OTHER; note = 2'-O-methyluridine-3'-phosphorothioate
  modified_base 2: mod_base = OTHER; note = 2'-O-methylcytidine-3'-phosphorothioate
  modified_base 3: mod_base = OTHER; note = 2'-O-methylcytidine-3'-phosphate
  modified_base 4: mod_base = OTHER; note = 2'-O-methyluridine-3'-phosphate
  modified_base 5: mod_base = OTHER; note = 2'-O-methyluridine-3'-phosphate
  modified_base 6: mod_base = OTHER; note = 2'-O-methylcytidine-3'-phosphate
  modified_base 7: mod_base = OTHER; note = 2'-fluoroadenosine-3'-phosphate
  modified_base 8: mod_base = OTHER; note = 2'-O-methylcytidine-3'-phosphate
  modified_base 9: mod_base = OTHER; note = 2'-fluorouridine-3'-phosphate
  modified_base 10: mod_base = OTHER; note = 2'-fluoroguanosine-3'-phosphate
  modified_base 11: mod_base = OTHER; note = 2'-fluoroadenosine-3'-phosphate
  modified_base 12: mod_base = OTHER; note = 2'-O-methyladenosine-3'-phosphate
  modified_base 13: mod_base = OTHER; note = 2'-O-methylcytidine-3'-phosphate
  modified_base 14: mod_base = OTHER; note = 2'-O-methyladenosine-3'-phosphate
  modified_base 15: mod_base = OTHER; note = 2'-O-methyluridine-3'-phosphate
  modified_base 16: mod_base = OTHER; note = 2'-O-methylguanosine-3'-phosphate
  modified_base 17: mod_base = OTHER; note = 2'-O-methylcytidine-3'-phosphate
  modified_base 18: mod_base = OTHER; note = 2'-O-methylcytidine-3'-phosphate
  modified_base 19: mod_base = OTHER; note = 2'-O-methyluridine-3'-phosphate
  modified_base 20: mod_base = OTHER; note = 2'-O-methyladenosine-3'-phosphate
  modified_base 21: mod_base = OTHER; note = 2'-O-methyladenosine-3'-phosphate N-[tris(GalNAc-alkyl)-amidodecanoyl)]-4-hydroxyprolinol Hyp-(GalNAc-alkyl)3
tccttcactgaacatgcctaa

SEQ ID NO: 3616 - RNA, 21 nt, synthetic construct
  source 1..21: mol_type = other RNA; note = Description of Artificial Sequence: Synthetic oligonucleotide
  modified_base 1: mod_base = OTHER; note = 2'-O-methylcytidine-3'-phosphorothioate
  modified_base 2: mod_base = OTHER; note = 2'-O-methyladenosine-3'-phosphorothioate
  modified_base 3: mod_base = OTHER; note = 2'-O-methylcytidine-3'-phosphate
  modified_base 4: mod_base = OTHER; note = 2'-O-methyluridine-3'-phosphate
  modified_base 5: mod_base = OTHER; note = 2'-O-methylguanosine-3'-phosphate
  modified_base 6: mod_base = OTHER; note = 2'-O-methyladenosine-3'-phosphate
  modified_base 7: mod_base = OTHER; note = 2'-fluoroadenosine-3'-phosphate
  modified_base 8: mod_base = OTHER; note = 2'-O-methylcytidine-3'-phosphate
  modified_base 9: mod_base = OTHER; note = 2'-fluoroadenosine-3'-phosphate
  modified_base 10: mod_base = OTHER; note = 2'-fluorouridine-3'-phosphate
  modified_base 11: mod_base = OTHER; note = 2'-fluoroguanosine-3'-phosphate
  modified_base 12: mod_base = OTHER; note = 2'-O-methylcytidine-3'-phosphate
  modified_base 13: mod_base = OTHER; note = 2'-O-methylcytidine-3'-phosphate
  modified_base 14: mod_base = OTHER; note = 2'-O-methyluridine-3'-phosphate
  modified_base 15: mod_base = OTHER; note = 2'-O-methyladenosine-3'-phosphate
  modified_base 16: mod_base = OTHER; note = 2'-O-methylguanosine-3'-phosphate
  modified_base 17: mod_base = OTHER; note = 2'-O-methyluridine-3'-phosphate
  modified_base 18: mod_base = OTHER; note = 2'-O-methylcytidine-3'-phosphate
  modified_base 19: mod_base = OTHER; note = 2'-O-methylcytidine-3'-phosphate
  modified_base 20: mod_base = OTHER; note = 2'-O-methyladenosine-3'-phosphate
  modified_base 21: mod_base = OTHER; note = 2'-O-methyladenosine-3'-phosphate N-[tris(GalNAc-alkyl)-amidodecanoyl)]-4-hydroxyprolinol Hyp-(GalNAc-alkyl)3
cactgaacatgcctagtccaa

SEQ ID NO: 3617 - RNA, 21 nt, synthetic construct
  source 1..21: mol_type = other RNA; note = Description of Artificial Sequence: Synthetic oligonucleotide
  modified_base 1: mod_base = OTHER; note = 2'-O-methyladenosine-3'-phosphorothioate
  modified_base 2: mod_base = OTHER; note = 2'-O-methyladenosine-3'-phosphorothioate
  modified_base 3: mod_base = OTHER; note = 2'-O-methylguanosine-3'-phosphate
  modified_base 4: mod_base = OTHER; note = 2'-O-methyluridine-3'-phosphate
  modified_base 5: mod_base = OTHER; note = 2'-O-methylguanosine-3'-phosphate
  modified_base 6: mod_base = OTHER; note = 2'-O-methyluridine-3'-phosphate
  modified_base 7: mod_base = OTHER; note = 2'-fluorouridine-3'-phosphate
  modified_base 8: mod_base = OTHER; note = 2'-O-methyladenosine-3'-phosphate
  modified_base 9: mod_base = OTHER; note = 2'-fluorouridine-3'-phosphate
  modified_base 10: mod_base = OTHER; note = 2'-fluoroadenosine-3'-phosphate
  modified_base 11: mod_base = OTHER; note = 2'-fluorocytidine-3'-phosphate
  modified_base 12: mod_base = OTHER; note = 2'-O-methylcytidine-3'-phosphate
  modified_base 13: mod_base = OTHER; note = 2'-O-methyladenosine-3'-phosphate
  modified_base 14: mod_base = OTHER; note = 2'-O-methyladenosine-3'-phosphate
  modified_base 15: mod_base = OTHER; note = 2'-O-methylcytidine-3'-phosphate
  modified_base 16: mod_base = OTHER; note = 2'-O-methyluridine-3'-phosphate
  modified_base 17: mod_base = OTHER; note = 2'-O-methyladenosine-3'-phosphate
  modified_base 18: mod_base = OTHER; note = 2'-O-methyladenosine-3'-phosphate
  modified_base 19: mod_base = OTHER; note = 2'-O-methyladenosine-3'-phosphate
  modified_base 20: mod_base = OTHER; note = 2'-O-methyladenosine-3'-phosphate
  modified_base 21: mod_base = OTHER; note = 2'-O-methylcytidine-3'-phosphate N-[tris(GalNAc-alkyl)-amidodecanoyl)]-4-hydroxyprolinol Hyp-(GalNAc-alkyl)3
aagtgttataccaactaaaac

SEQ ID NO: 3618 - RNA, 21 nt, synthetic construct
  source 1..21: mol_type = other RNA; note = Description of Artificial Sequence: Synthetic oligonucleotide
  modified_base 1: mod_base = OTHER; note = 2'-O-methyluridine-3'-phosphorothioate
  modified_base 2: mod_base = OTHER; note = 2'-O-methyluridine-3'-phosphorothioate
  modified_base 3: mod_base = OTHER; note = 2'-O-methylcytidine-3'-phosphate
  modified_base 4: mod_base = OTHER; note = 2'-O-methylcytidine-3'-phosphate
  modified_base 5: mod_base = OTHER; note = 2'-O-methyladenosine-3'-phosphate
  modified_base 6: mod_base = OTHER; note = 2'-O-methylcytidine-3'-phosphate
  modified_base 7: mod_base = OTHER; note = 2'-fluorocytidine-3'-phosphate
  modified_base 8: mod_base = OTHER; note = 2'-O-methyladenosine-3'-phosphate
  modified_base 9: mod_base = OTHER; note = 2'-fluorouridine-3'-phosphate
  modified_base 10: mod_base = OTHER; note = 2'-fluoroguanosine-3'-phosphate
  modified_base 11: mod_base = OTHER; note = 2'-fluoroadenosine-3'-phosphate
  modified_base 12: mod_base = OTHER; note = 2'-O-methyluridine-3'-phosphate
  modified_base 13: mod_base = OTHER; note = 2'-O-methyluridine-3'-phosphate
  modified_base 14: mod_base = OTHER; note = 2'-O-methyladenosine-3'-phosphate
  modified_base 15: mod_base = OTHER; note = 2'-O-methyladenosine-3'-phosphate
  modified_base 16: mod_base = OTHER; note = 2'-O-methylguanosine-3'-phosphate
  modified_base 17: mod_base = OTHER; note = 2'-O-methylguanosine-3'-phosphate
  modified_base 18: mod_base = OTHER; note = 2'-O-methylguanosine-3'-phosphate
  modified_base 19: mod_base = OTHER; note = 2'-O-methyluridine-3'-phosphate
  modified_base 20: mod_base = OTHER; note = 2'-O-methylcytidine-3'-phosphate
  modified_base 21: mod_base = OTHER; note = 2'-O-methyluridine-3'-phosphate N-[tris(GalNAc-alkyl)-amidodecanoyl)]-4-hydroxyprolinol Hyp-(GalNAc-alkyl)3
ttccaccatgattaagggtct

SEQ ID NO: 3619 - RNA, 21 nt, synthetic construct
  source 1..21: mol_type = other RNA; note = Description of Artificial Sequence: Synthetic oligonucleotide
  modified_base 1: mod_base = OTHER; note = 2'-O-methylguanosine-3'-phosphorothioate
  modified_base 2: mod_base = OTHER; note = 2'-O-methyladenosine-3'-phosphorothioate
  modified_base 3: mod_base = OTHER; note = 2'-O-methyladenosine-3'-phosphate
  modified_base 4: mod_base = OTHER; note = 2'-O-methylcytidine-3'-phosphate
  modified_base 5: mod_base = OTHER; note = 2'-O-methyladenosine-3'-phosphate
  modified_base 6: mod_base = OTHER; note = 2'-O-methyluridine-3'-phosphate
  modified_base 7: mod_base = OTHER; note = 2'-fluoroguanosine-3'-phosphate
  modified_base 8: mod_base = OTHER; note = 2'-O-methylcytidine-3'-phosphate
  modified_base 9: mod_base = OTHER; note = 2'-fluorocytidine-3'-phosphate
  modified_base 10: mod_base = OTHER; note = 2'-fluorouridine-3'-phosphate
  modified_base 11: mod_base = OTHER; note = 2'-fluoroadenosine-3'-phosphate
  modified_base 12: mod_base = OTHER; note = 2'-O-methylguanosine-3'-phosphate
  modified_base 13: mod_base = OTHER; note = 2'-O-methyluridine-3'-phosphate
  modified_base 14: mod_base = OTHER; note = 2'-O-methylcytidine-3'-phosphate
  modified_base 15: mod_base = OTHER; note = 2'-O-methylcytidine-3'-phosphate
  modified_base 16: mod_base = OTHER; note = 2'-O-methyladenosine-3'-phosphate
  modified_base 17: mod_base = OTHER; note = 2'-O-methyladenosine-3'-phosphate
  modified_base 18: mod_base = OTHER; note = 2'-O-methylcytidine-3'-phosphate
  modified_base 19: mod_base = OTHER; note = 2'-O-methyladenosine-3'-phosphate
  modified_base 20: mod_base = OTHER; note = 2'-O-methyluridine-3'-phosphate
  modified_base 21: mod_base = OTHER; note = 2'-O-methyluridine-3'-phosphate N-[tris(GalNAc-alkyl)-amidodecanoyl)]-4-hydroxyprolinol Hyp-(GalNAc-alkyl)3
gaacatgcctagtccaacatt

SEQ ID NO: 3620 - RNA, 21 nt, synthetic construct
  source 1..21: mol_type = other RNA; note = Description of Artificial Sequence: Synthetic oligonucleotide
  modified_base 1: mod_base = OTHER; note = 2'-O-methyladenosine-3'-phosphorothioate
  modified_base 2: mod_base = OTHER; note = 2'-O-methyluridine-3'-phosphorothioate
  modified_base 3: mod_base = OTHER; note = 2'-O-methylcytidine-3'-phosphate
  modified_base 4: mod_base = OTHER; note = 2'-O-methyladenosine-3'-phosphate
  modified_base 5: mod_base = OTHER; note = 2'-O-methylguanosine-3'-phosphate
  modified_base 6: mod_base = OTHER; note = 2'-O-methyluridine-3'-phosphate
  modified_base 7: mod_base = OTHER; note = 2'-fluoroadenosine-3'-phosphate
  modified_base 8: mod_base = OTHER; note = 2'-O-methylguanosine-3'-phosphate
  modified_base 9: mod_base = OTHER; note = 2'-fluorouridine-3'-phosphate
  modified_base 10: mod_base = OTHER; note = 2'-fluoroguanosine-3'-phosphate
  modified_base 11: mod_base = OTHER; note = 2'-fluorouridine-3'-phosphate
  modified_base 12: mod_base = OTHER; note = 2'-O-methyladenosine-3'-phosphate
  modified_base 13: mod_base = OTHER; note = 2'-O-methylcytidine-3'-phosphate
  modified_base 14: mod_base = OTHER; note = 2'-O-methyladenosine-3'-phosphate
  modified_base 15: mod_base = OTHER; note = 2'-O-methyluridine-3'-phosphate
  modified_base 16: mod_base = OTHER; note = 2'-O-methyluridine-3'-phosphate
  modified_base 17: mod_base = OTHER; note = 2'-O-methyladenosine-3'-phosphate
  modified_base 18: mod_base = OTHER; note = 2'-O-methylcytidine-3'-phosphate
  modified_base 19: mod_base = OTHER; note = 2'-O-methylcytidine-3'-phosphate
  modified_base 20: mod_base = OTHER; note = 2'-O-methyladenosine-3'-phosphate
  modified_base 21: mod_base = OTHER; note = 2'-O-methyluridine-3'-phosphate N-[tris(GalNAc-alkyl)-amidodecanoyl)]-4-hydroxyprolinol Hyp-(GalNAc-alkyl)3
atcagtagtgtacattaccat

SEQ ID NO: 3621 - RNA, 21 nt, synthetic construct
  source 1..21: mol_type = other RNA; note = Description of Artificial Sequence: Synthetic oligonucleotide
  modified_base 1: mod_base = OTHER; note = 2'-O-methyladenosine-3'-phosphorothioate
  modified_base 2: mod_base = OTHER; note = 2'-O-methyluridine-3'-phosphorothioate
  modified_base 3: mod_base = OTHER; note = 2'-O-methylcytidine-3'-phosphate
  modified_base 4: mod_base = OTHER; note = 2'-O-methylcytidine-3'-phosphate
  modified_base 5: mod_base = OTHER; note = 2'-O-methyladenosine-3'-phosphate
  modified_base 6: mod_base = OTHER; note = 2'-O-methyladenosine-3'-phosphate
  modified_base 7: mod_base = OTHER; note = 2'-fluoroguanosine-3'-phosphate
  modified_base 8: mod_base = OTHER; note = 2'-O-methyluridine-3'-phosphate
  modified_base 9: mod_base = OTHER; note = 2'-fluoroguanosine-3'-phosphate
  modified_base 10: mod_base = OTHER; note = 2'-fluorouridine-3'-phosphate
  modified_base 11: mod_base = OTHER; note = 2'-fluorouridine-3'-phosphate
  modified_base 12: mod_base = OTHER; note = 2'-O-methyladenosine-3'-phosphate
  modified_base 13: mod_base = OTHER; note = 2'-O-methyluridine-3'-phosphate
  modified_base 14: mod_base = OTHER; note = 2'-O-methyladenosine-3'-phosphate
  modified_base 15: mod_base = OTHER; note = 2'-O-methylcytidine-3'-phosphate
  modified_base 16: mod_base = OTHER; note = 2'-O-methylcytidine-3'-phosphate
  modified_base 17: mod_base = OTHER; note = 2'-O-methyladenosine-3'-phosphate
  modified_base 18: mod_base = OTHER; note = 2'-O-methyladenosine-3'-phosphate
  modified_base 19: mod_base = OTHER; note = 2'-O-methylcytidine-3'-phosphate
  modified_base 20: mod_base = OTHER; note = 2'-O-methyluridine-3'-phosphate
  modified_base 21: mod_base = OTHER; note = 2'-O-methyladenosine-3'-phosphate N-[tris(GalNAc-alkyl)-amidodecanoyl)]-4-hydroxyprolinol Hyp-(GalNAc-alkyl)3
atccaagtgttataccaacta

SEQ ID NO: 3622 - RNA, 21 nt, synthetic construct
  source 1..21: mol_type = other RNA; note = Description of Artificial Sequence: Synthetic oligonucleotide
  modified_base 1: mod_base = OTHER; note = 2'-O-methylcytidine-3'-phosphorothioate
  modified_base 2: mod_base = OTHER; note = 2'-O-methylcytidine-3'-phosphorothioate
  modified_base 3: mod_base = OTHER; note = 2'-O-methyladenosine-3'-phosphate
  modified_base 4: mod_base = OTHER; note = 2'-O-methyladenosine-3'-phosphate
  modified_base 5: mod_base = OTHER; note = 2'-O-methylguanosine-3'-phosphate
  modified_base 6: mod_base = OTHER; note = 2'-O-methyluridine-3'-phosphate
  modified_base 7: mod_base = OTHER; note = 2'-fluorocytidine-3'-phosphate
  modified_base 8: mod_base = OTHER; note = 2'-O-methylcytidine-3'-phosphate
  modified_base 9: mod_base = OTHER; note = 2'-fluoroadenosine-3'-phosphate
  modified_base 10: mod_base = OTHER; note = 2'-fluoroadenosine-3'-phosphate
  modified_base 11: mod_base = OTHER; note = 2'-fluorouridine-3'-phosphate
  modified_base 12: mod_base = OTHER; note = 2'-O-methyladenosine-3'-phosphate
  modified_base 13: mod_base = OTHER; note = 2'-O-methyluridine-3'-phosphate
  modified_base 14: mod_base = OTHER; note = 2'-O-methylguanosine-3'-phosphate
  modified_base 15: mod_base = OTHER; note = 2'-O-methylguanosine-3'-phosphate
  modified_base 16: mod_base = OTHER; note = 2'-O-methylcytidine-3'-phosphate
  modified_base 17: mod_base = OTHER; note = 2'-O-methyladenosine-3'-phosphate
  modified_base 18: mod_base = OTHER; note = 2'-O-methyladenosine-3'-phosphate
  modified_base 19: mod_base = OTHER; note = 2'-O-methylcytidine-3'-phosphate
  modified_base 20: mod_base = OTHER; note = 2'-O-methyluridine-3'-phosphate
  modified_base 21: mod_base = OTHER; note = 2'-O-methyladenosine-3'-phosphate N-[tris(GalNAc-alkyl)-amidodecanoyl)]-4-hydroxyprolinol Hyp-(GalNAc-alkyl)3
ccaagtccaatatggcaacta

SEQ ID NO: 3623 - RNA, 21 nt, synthetic construct
  source 1..21: mol_type = other RNA; note = Description of Artificial Sequence: Synthetic oligonucleotide
  modified_base 1: mod_base = OTHER; note = 2'-O-methyladenosine-3'-phosphorothioate
  modified_base 2: mod_base = OTHER; note = 2'-O-methyluridine-3'-phosphorothioate
  modified_base 3: mod_base = OTHER; note = 2'-O-methylcytidine-3'-phosphate
  modified_base 4: mod_base = OTHER; note = 2'-O-methyluridine-3'-phosphate
  modified_base 5: mod_base = OTHER; note = 2'-O-methylcytidine-3'-phosphate
  modified_base 6: mod_base = OTHER; note = 2'-O-methyladenosine-3'-phosphate
  modified_base 7: mod_base = OTHER; note = 2'-fluoroguanosine-3'-phosphate
  modified_base 8: mod_base = OTHER; note = 2'-O-methyladenosine-3'-phosphate
  modified_base 9: mod_base = OTHER; note = 2'-fluorocytidine-3'-phosphate
  modified_base 10: mod_base = OTHER; note = 2'-fluorocytidine-3'-phosphate
  modified_base 11: mod_base = OTHER; note = 2'-fluorouridine-3'-phosphate
  modified_base 12: mod_base = OTHER; note = 2'-O-methyluridine-3'-phosphate
  modified_base 13: mod_base = OTHER; note = 2'-O-methylguanosine-3'-phosphate
  modified_base 14: mod_base = OTHER; note = 2'-O-methyluridine-3'-phosphate
  modified_base 15: mod_base = OTHER; note = 2'-O-methylguanosine-3'-phosphate
  modified_base 16: mod_base = OTHER; note = 2'-O-methyladenosine-3'-phosphate
  modified_base 17: mod_base = OTHER; note = 2'-O-methyladenosine-3'-phosphate
  modified_base 18: mod_base = OTHER; note = 2'-O-methylguanosine-3'-phosphate
  modified_base 19: mod_base = OTHER; note = 2'-O-methylguanosine-3'-phosphate
  modified_base 20: mod_base = OTHER; note = 2'-O-methyluridine-3'-phosphate
  modified_base 21: mod_base = OTHER; note = 2'-O-methyladenosine-3'-phosphate N-[tris(GalNAc-alkyl)-amidodecanoyl)]-4-hydroxyprolinol Hyp-(GalNAc-alkyl)3
atctcagaccttgtgaaggta

SEQ ID NO: 3624 - RNA, 21 nt, synthetic construct
  source 1..21: mol_type = other RNA; note = Description of Artificial Sequence: Synthetic oligonucleotide
  modified_base 1: mod_base = OTHER; note = 2'-O-methylcytidine-3'-phosphorothioate
  modified_base 2: mod_base = OTHER; note = 2'-O-methyladenosine-3'-phosphorothioate
  modified_base 3: mod_base = OTHER; note = 2'-O-methyluridine-3'-phosphate
  modified_base 4: mod_base = OTHER; note = 2'-O-methyluridine-3'-phosphate
  modified_base 5: mod_base = OTHER; note = 2'-O-methyluridine-3'-phosphate
  modified_base 6: mod_base = OTHER; note = 2'-O-methylcytidine-3'-phosphate
  modified_base 7: mod_base = OTHER; note = 2'-fluoroadenosine-3'-phosphate
  modified_base 8: mod_base = OTHER; note = 2'-O-methylcytidine-3'-phosphate
  modified_base 9: mod_base = OTHER; note = 2'-fluorouridine-3'-phosphate
  modified_base 10: mod_base = OTHER; note = 2'-fluoroguanosine-3'-phosphate
  modified_base 11: mod_base = OTHER; note = 2'-fluorouridine-3'-phosphate
  modified_base 12: mod_base = OTHER; note = 2'-O-methylcytidine-3'-phosphate
  modified_base 13: mod_base = OTHER; note = 2'-O-methyluridine-3'-phosphate
  modified_base 14: mod_base = OTHER; note = 2'-O-methyladenosine-3'-phosphate
  modified_base 15: mod_base = OTHER; note = 2'-O-methylguanosine-3'-phosphate
  modified_base 16: mod_base = OTHER; note = 2'-O-methylguanosine-3'-phosphate
  modified_base 17: mod_base = OTHER; note = 2'-O-methylcytidine-3'-phosphate
  modified_base 18: mod_base = OTHER; note = 2'-O-methyluridine-3'-phosphate
  modified_base 19: mod_base = OTHER; note = 2'-O-methyladenosine-3'-phosphate
  modified_base 20: mod_base = OTHER; note = 2'-O-methylcytidine-3'-phosphate
  modified_base 21: mod_base = OTHER; note = 2'-O-methyladenosine-3'-phosphate N-[tris(GalNAc-alkyl)-amidodecanoyl)]-4-hydroxyprolinol Hyp-(GalNAc-alkyl)3
catttcactgtctaggctaca

SEQ ID NO: 3625 - RNA, 21 nt, synthetic construct
  source 1..21: mol_type = other RNA; note = Description of Artificial Sequence: Synthetic oligonucleotide
  modified_base 1: mod_base = OTHER; note = 2'-O-methylcytidine-3'-phosphorothioate
  modified_base 2: mod_base = OTHER; note = 2'-O-methylcytidine-3'-phosphorothioate
  modified_base 3: mod_base = OTHER; note = 2'-O-methyladenosine-3'-phosphate
  modified_base 4: mod_base = OTHER; note = 2'-O-methylcytidine-3'-phosphate
  modified_base 5: mod_base = OTHER; note = 2'-O-methyladenosine-3'-phosphate
  modified_base 6: mod_base = OTHER; note = 2'-O-methylguanosine-3'-phosphate
  modified_base 7: mod_base = OTHER; note = 2'-fluorocytidine-3'-phosphate
  modified_base 8: mod_base = OTHER; note = 2'-O-methyluridine-3'-phosphate
  modified_base 9: mod_base = OTHER; note = 2'-fluoroadenosine-3'-phosphate
  modified_base 10: mod_base = OTHER; note = 2'-fluorouridine-3'-phosphate
  modified_base 11: mod_base = OTHER; note = 2'-fluoroadenosine-3'-phosphate
  modified_base 12: mod_base = OTHER; note = 2'-O-methyluridine-3'-phosphate
  modified_base 13: mod_base = OTHER; note = 2'-O-methylcytidine-3'-phosphate
  modified_base 14: mod_base = OTHER; note = 2'-O-methylcytidine-3'-phosphate
  modified_base 15: mod_base = OTHER; note = 2'-O-methyluridine-3'-phosphate
  modified_base 16: mod_base = OTHER; note = 2'-O-methylguanosine-3'-phosphate
  modified_base 17: mod_base = OTHER; note = 2'-O-methyladenosine-3'-phosphate
  modified_base 18: mod_base = OTHER; note = 2'-O-methyluridine-3'-phosphate
  modified_base 19: mod_base = OTHER; note = 2'-O-methylguanosine-3'-phosphate
  modified_base 20: mod_base = OTHER; note = 2'-O-methylcytidine-3'-phosphate
  modified_base 21: mod_base = OTHER; note = 2'-O-methyluridine-3'-phosphate N-[tris(GalNAc-alkyl)-amidodecanoyl)]-4-hydroxyprolinol Hyp-(GalNAc-alkyl)3
ccacagctatatcctgatgct

SEQ ID NO: 3626 - RNA, 21 nt, synthetic construct
  source 1..21: mol_type = other RNA; note = Description of Artificial Sequence: Synthetic oligonucleotide
  modified_base 1: mod_base = OTHER; note = 2'-O-methylcytidine-3'-phosphorothioate
  modified_base 2: mod_base = OTHER; note = 2'-O-methyluridine-3'-phosphorothioate
  modified_base 3: mod_base = OTHER; note = 2'-O-methyluridine-3'-phosphate
  modified_base 4: mod_base = OTHER; note = 2'-O-methylcytidine-3'-phosphate
  modified_base 5: mod_base = OTHER; note = 2'-O-methyladenosine-3'-phosphate
  modified_base 6: mod_base = OTHER; note = 2'-O-methylcytidine-3'-phosphate
  modified_base 7: mod_base = OTHER; note = 2'-fluorouridine-3'-phosphate
  modified_base 8: mod_base = OTHER; note = 2'-O-methylguanosine-3'-phosphate
  modified_base 9: mod_base = OTHER; note = 2'-fluoroadenosine-3'-phosphate
  modified_base 10: mod_base = OTHER; note = 2'-fluoroadenosine-3'-phosphate
  modified_base 11: mod_base = OTHER; note = 2'-fluorocytidine-3'-phosphate
  modified_base 12: mod_base = OTHER; note = 2'-O-methyladenosine-3'-phosphate
  modified_base 13: mod_base = OTHER; note = 2'-O-methyluridine-3'-phosphate
  modified_base 14: mod_base = OTHER; note = 2'-O-methylguanosine-3'-phosphate
  modified_base 15: mod_base = OTHER; note = 2'-O-methylcytidine-3'-phosphate
  modified_base 16: mod_base = OTHER; note = 2'-O-methylcytidine-3'-phosphate
  modified_base 17: mod_base = OTHER; note = 2'-O-methyluridine-3'-phosphate
  modified_base 18: mod_base = OTHER; note = 2'-O-methyladenosine-3'-phosphate
  modified_base 19: mod_base = OTHER; note = 2'-O-methylguanosine-3'-phosphate
  modified_base 20: mod_base = OTHER; note = 2'-O-methyluridine-3'-phosphate
  modified_base 21: mod_base = OTHER; note = 2'-O-methyladenosine-3'-phosphate N-[tris(GalNAc-alkyl)-amidodecanoyl)]-4-hydroxyprolinol Hyp-(GalNAc-alkyl)3
cttcactgaacatgcctagta

SEQ ID NO: 3627 - RNA, 21 nt, synthetic construct
  source 1..21: mol_type = other RNA; note = Description of Artificial Sequence: Synthetic oligonucleotide
  modified_base 1: mod_base = OTHER; note = 2'-O-methylguanosine-3'-phosphorothioate
  modified_base 2: mod_base = OTHER; note = 2'-O-methyluridine-3'-phosphorothioate
  modified_base 3: mod_base = OTHER; note = 2'-O-methylguanosine-3'-phosphate
  modified_base 4: mod_base = OTHER; note = 2'-O-methylguanosine-3'-phosphate
  modified_base 5: mod_base = OTHER; note = 2'-O-methyluridine-3'-phosphate
  modified_base 6: mod_base = OTHER; note = 2'-O-methyluridine-3'-phosphate
  modified_base 7: mod_base = OTHER; note = 2'-fluoroguanosine-3'-phosphate
  modified_base 8: mod_base = OTHER; note = 2'-O-methyladenosine-3'-phosphate
  modified_base 9: mod_base = OTHER; note = 2'-fluoroguanosine-3'-phosphate
  modified_base 10: mod_base = OTHER; note = 2'-fluoroadenosine-3'-phosphate
  modified_base 11: mod_base = OTHER; note = 2'-fluoroguanosine-3'-phosphate
  modified_base 12: mod_base = OTHER; note = 2'-O-methyluridine-3'-phosphate
  modified_base 13: mod_base = OTHER; note = 2'-O-methylguanosine-3'-phosphate
  modified_base 14: mod_base = OTHER; note = 2'-O-methylcytidine-3'-phosphate
  modified_base 15: mod_base = OTHER; note = 2'-O-methyluridine-3'-phosphate
  modified_base 16: mod_base = OTHER; note = 2'-O-methyluridine-3'-phosphate
  modified_base 17: mod_base = OTHER; note = 2'-O-methyladenosine-3'-phosphate
  modified_base 18: mod_base = OTHER; note = 2'-O-methyluridine-3'-phosphate
  modified_base 19: mod_base = OTHER; note = 2'-O-methylguanosine-3'-phosphate
  modified_base 20: mod_base = OTHER; note = 2'-O-methyladenosine-3'-phosphate
  modified_base 21: mod_base = OTHER; note = 2'-O-methyladenosine-3'-phosphate N-[tris(GalNAc-alkyl)-amidodecanoyl)]-4-hydroxyprolinol Hyp-(GalNAc-alkyl)3
gtggttgagagtgcttatgaa

SEQ ID NO: 3628 - RNA, 21 nt, synthetic construct
  source 1..21: mol_type = other RNA; note = Description of Artificial Sequence: Synthetic oligonucleotide
  modified_base 1: mod_base = OTHER; note = 2'-O-methylcytidine-3'-phosphorothioate
  modified_base 2: mod_base = OTHER; note = 2'-O-methyladenosine-3'-phosphorothioate
  modified_base 3: mod_base = OTHER; note = 2'-O-methyladenosine-3'-phosphate
  modified_base 4: mod_base = OTHER; note = 2'-O-methyladenosine-3'-phosphate
  modified_base 5: mod_base = OTHER; note = 2'-O-methylcytidine-3'-phosphate
  modified_base 6: mod_base = OTHER; note = 2'-O-methyluridine-3'-phosphate
  modified_base 7: mod_base = OTHER; note = 2'-fluorocytidine-3'-phosphate
  modified_base 8: mod_base = OTHER; note = 2'-O-methyladenosine-3'-phosphate
  modified_base 9: mod_base = OTHER; note = 2'-fluoroadenosine-3'-phosphate
  modified_base 10: mod_base = OTHER; note = 2'-fluoroadenosine-3'-phosphate
  modified_base 11: mod_base = OTHER; note = 2'-fluoroguanosine-3'-phosphate
  modified_base 12: mod_base = OTHER; note = 2'-O-methylguanosine-3'-phosphate
  modified_base 13: mod_base = OTHER; note = 2'-O-methylcytidine-3'-phosphate
  modified_base 14: mod_base = OTHER; note = 2'-O-methyluridine-3'-phosphate
  modified_base 15: mod_base = OTHER; note = 2'-O-methyladenosine-3'-phosphate
  modified_base 16: mod_base = OTHER; note = 2'-O-methylcytidine-3'-phosphate
  modified_base 17: mod_base = OTHER; note = 2'-O-methyladenosine-3'-phosphate
  modified_base 18: mod_base = OTHER; note = 2'-O-methylcytidine-3'-phosphate
  modified_base 19: mod_base = OTHER; note = 2'-O-methyladenosine-3'-phosphate
  modified_base 20: mod_base = OTHER; note = 2'-O-methyluridine-3'-phosphate
  modified_base 21: mod_base = OTHER; note = 2'-O-methyladenosine-3'-phosphate N-[tris(GalNAc-alkyl)-amidodecanoyl)]-4-hydroxyprolinol Hyp-(GalNAc-alkyl)3
caaactcaaaggctacacata

SEQ ID NO: 3629 - RNA, 21 nt, synthetic construct
  source 1..21: mol_type = other RNA; note = Description of Artificial Sequence: Synthetic oligonucleotide
  modified_base 1: mod_base = OTHER; note = 2'-O-methyladenosine-3'-phosphorothioate
  modified_base 2: mod_base = OTHER; note = 2'-O-methyluridine-3'-phosphorothioate
  modified_base 3: mod_base = OTHER; note = 2'-O-methyladenosine-3'-phosphate
  modified_base 4: mod_base = OTHER; note = 2'-O-methyluridine-3'-phosphate
  modified_base 5: mod_base = OTHER; note = 2'-O-methylcytidine-3'-phosphate
  modified_base 6: mod_base = OTHER; note = 2'-O-methyladenosine-3'-phosphate
  modified_base 7: mod_base = OTHER; note = 2'-fluoroguanosine-3'-phosphate
  modified_base 8: mod_base = OTHER; note = 2'-O-methyluridine-3'-phosphate
  modified_base 9: mod_base = OTHER; note = 2'-fluoroadenosine-3'-phosphate
  modified_base 10: mod_base = OTHER; note = 2'-fluoroguanosine-3'-phosphate
  modified_base 11: mod_base = OTHER; note = 2'-fluorouridine-3'-phosphate
  modified_base 12: mod_base = OTHER; note = 2'-O-methylguanosine-3'-phosphate
  modified_base 13: mod_base = OTHER; note = 2'-O-methyluridine-3'-phosphate
  modified_base 14: mod_base = OTHER; note = 2'-O-methyladenosine-3'-phosphate
  modified_base 15: mod_base = OTHER; note = 2'-O-methylcytidine-3'-phosphate
  modified_base 16: mod_base = OTHER; note = 2'-O-methyladenosine-3'-phosphate
  modified_base 17: mod_base = OTHER; note = 2'-O-methyluridine-3'-phosphate
  modified_base 18: mod_base = OTHER; note = 2'-O-methyluridine-3'-phosphate
  modified_base 19: mod_base = OTHER; note = 2'-O-methyladenosine-3'-phosphate
  modified_base 20: mod_base = OTHER; note = 2'-O-methylcytidine-3'-phosphate
  modified_base 21: mod_base = OTHER; note = 2'-O-methyladenosine-3'-phosphate N-[tris(GalNAc-alkyl)-amidodecanoyl)]-4-hydroxyprolinol Hyp-(GalNAc-alkyl)3
atatcagtagtgtacattaca

SEQ ID NO: 3630 - RNA, 21 nt, synthetic construct
  source 1..21: mol_type = other RNA; note = Description of Artificial Sequence: Synthetic oligonucleotide
  modified_base 1: mod_base = OTHER; note = 2'-O-methylcytidine-3'-phosphorothioate
  modified_base 2: mod_base = OTHER; note = 2'-O-methyladenosine-3'-phosphorothioate
  modified_base 3: mod_base = OTHER; note = 2'-O-methyladenosine-3'-phosphate
  modified_base 4: mod_base = OTHER; note = 2'-O-methylcytidine-3'-phosphate
  modified_base 5: mod_base = OTHER; note = 2'-O-methylcytidine-3'-phosphate
  modified_base 6: mod_base = OTHER; note = 2'-O-methyladenosine-3'-phosphate
  modified_base 7: mod_base = OTHER; note = 2'-fluoroadenosine-3'-phosphate
  modified_base 8: mod_base = OTHER; note = 2'-O-methylcytidine-3'-phosphate
  modified_base 9: mod_base = OTHER; note = 2'-fluorouridine-3'-phosphate
  modified_base 10: mod_base = OTHER; note = 2'-fluoroadenosine-3'-phosphate
  modified_base 11: mod_base = OTHER; note = 2'-fluorouridine-3'-phosphate
  modified_base 12: mod_base = OTHER; note = 2'-O-methylcytidine-3'-phosphate
  modified_base 13: mod_base = OTHER; note = 2'-O-methylcytidine-3'-phosphate
  modified_base 14: mod_base = OTHER; note = 2'-O-methyladenosine-3'-phosphate
  modified_base 15: mod_base = OTHER; note = 2'-O-methyladenosine-3'-phosphate
  modified_base 16: mod_base = OTHER; note = 2'-O-methylguanosine-3'-phosphate
  modified_base 17: mod_base = OTHER; note = 2'-O-methyluridine-3'-phosphate
  modified_base 18: mod_base = OTHER; note = 2'-O-methylguanosine-3'-phosphate
  modified_base 19: mod_base = OTHER; note = 2'-O-methyluridine-3'-phosphate
  modified_base 20: mod_base = OTHER; note = 2'-O-methyluridine-3'-phosphate
  modified_base 21: mod_base = OTHER; note = 2'-O-methyladenosine-3'-phosphate N-[tris(GalNAc-alkyl)-amidodecanoyl)]-4-hydroxyprolinol Hyp-(GalNAc-alkyl)3
caaccaactatccaagtgtta

SEQ ID NO: 3631 - RNA, 21 nt, synthetic construct
  source 1..21: mol_type = other RNA; note = Description of Artificial Sequence: Synthetic oligonucleotide
  modified_base 1: mod_base = OTHER; note = 2'-O-methyluridine-3'-phosphorothioate
  modified_base 2: mod_base = OTHER; note = 2'-O-methylcytidine-3'-phosphorothioate
  modified_base 3: mod_base = OTHER; note = 2'-O-methyladenosine-3'-phosphate
  modified_base 4: mod_base = OTHER; note = 2'-O-methyluridine-3'-phosphate
  modified_base 5: mod_base = OTHER; note = 2'-O-methylcytidine-3'-phosphate
  modified_base 6: mod_base = OTHER; note = 2'-O-methylguanosine-3'-phosphate
  modified_base 7: mod_base = OTHER; note = 2'-fluoroadenosine-3'-phosphate
  modified_base 8: mod_base = OTHER; note = 2'-O-methyladenosine-3'-phosphate
  modified_base 9: mod_base = OTHER; note = 2'-fluoroguanosine-3'-phosphate
  modified_base 10: mod_base = OTHER; note = 2'-fluoroadenosine-3'-phosphate
  modified_base 11: mod_base = OTHER; note = 2'-fluorocytidine-3'-phosphate
  modified_base 12: mod_base = OTHER; note = 2'-O-methyladenosine-3'-phosphate
  modified_base 13: mod_base = OTHER; note = 2'-O-methyladenosine-3'-phosphate
  modified_base 14: mod_base = OTHER; note = 2'-O-methyladenosine-3'-phosphate
  modified_base 15: mod_base = OTHER; note = 2'-O-methyluridine-3'-phosphate
  modified_base 16: mod_base = OTHER; note = 2'-O-methyluridine-3'-phosphate
  modified_base 17: mod_base = OTHER; note = 2'-O-methylguanosine-3'-phosphate
  modified_base 18: mod_base = OTHER; note = 2'-O-methyladenosine-3'-phosphate
  modified_base 19: mod_base = OTHER; note = 2'-O-methyladenosine-3'-phosphate
  modified_base 20: mod_base = OTHER; note = 2'-O-methylguanosine-3'-phosphate
  modified_base 21: mod_base = OTHER; note = 2'-O-methyladenosine-3'-phosphate N-[tris(GalNAc-alkyl)-amidodecanoyl)]-4-hydroxyprolinol Hyp-(GalNAc-alkyl)3
tcatcgaagacaaattgaaga

SEQ ID NO: 3632 - RNA, 21 nt, synthetic construct
  source 1..21: mol_type = other RNA; note = Description of Artificial Sequence: Synthetic oligonucleotide
  modified_base 1: mod_base = OTHER; note = 2'-O-methylguanosine-3'-phosphorothioate
  modified_base 2: mod_base = OTHER; note = 2'-O-methylcytidine-3'-phosphorothioate
  modified_base 3: mod_base = OTHER; note = 2'-O-methyladenosine-3'-phosphate
  modified_base 4: mod_base = OTHER; note = 2'-O-methylguanosine-3'-phosphate
  modified_base 5: mod_base = OTHER; note = 2'-O-methyladenosine-3'-phosphate
  modified_base 6: mod_base = OTHER; note = 2'-O-methyluridine-3'-phosphate
  modified_base 7: mod_base = OTHER; note = 2'-fluorouridine-3'-phosphate
  modified_base 8: mod_base = OTHER; note = 2'-O-methyluridine-3'-phosphate
  modified_base 9: mod_base = OTHER; note = 2'-fluoroguanosine-3'-phosphate
  modified_base 10: mod_base = OTHER; note = 2'-fluoroguanosine-3'-phosphate
  modified_base 11: mod_base = OTHER; note = 2'-fluorocytidine-3'-phosphate
  modified_base 12: mod_base = OTHER; note = 2'-O-methyladenosine-3'-phosphate
  modified_base 13: mod_base = OTHER; note = 2'-O-methylguanosine-3'-phosphate
  modified_base 14: mod_base = OTHER; note = 2'-O-methyladenosine-3'-phosphate
  modified_base 15: mod_base = OTHER; note = 2'-O-methylguanosine-3'-phosphate
  modified_base 16: mod_base = OTHER; note = 2'-O-methyladenosine-3'-phosphate
  modified_base 17: mod_base = OTHER; note = 2'-O-methylguanosine-3'-phosphate
  modified_base 18: mod_base = OTHER; note = 2'-O-methyluridine-3'-phosphate
  modified_base 19: mod_base = OTHER; note = 2'-O-methyladenosine-3'-phosphate
  modified_base 20: mod_base = OTHER; note = 2'-O-methyluridine-3'-phosphate
  modified_base 21: mod_base = OTHER; note = 2'-O-methyladenosine-3'-phosphate N-[tris(GalNAc-alkyl)-amidodecanoyl)]-4-hydroxyprolinol Hyp-(GalNAc-alkyl)3
gcagatttggcagagagtata

SEQ ID NO: 3633 - RNA, 21 nt, synthetic construct
  source 1..21: mol_type = other RNA; note = Description of Artificial Sequence: Synthetic oligonucleotide
  modified_base 1: mod_base = OTHER; note = 2'-O-methylcytidine-3'-phosphorothioate
  modified_base 2: mod_base = OTHER; note = 2'-O-methyluridine-3'-phosphorothioate
  modified_base 3: mod_base = OTHER; note = 2'-O-methylcytidine-3'-phosphate
  modified_base 4: mod_base = OTHER; note = 2'-O-methylcytidine-3'-phosphate
  modified_base 5: mod_base = OTHER; note = 2'-O-methyluridine-3'-phosphate
  modified_base 6: mod_base = OTHER; note = 2'-O-methyluridine-3'-phosphate
  modified_base 7: mod_base = OTHER; note = 2'-fluorocytidine-3'-phosphate
  modified_base 8: mod_base = OTHER; note = 2'-O-methyladenosine-3'-phosphate
  modified_base 9: mod_base = OTHER; note = 2'-fluorocytidine-3'-phosphate
  modified_base 10: mod_base = OTHER; note = 2'-fluorouridine-3'-phosphate
  modified_base 11: mod_base = OTHER; note = 2'-fluoroguanosine-3'-phosphate
  modified_base 12: mod_base = OTHER; note = 2'-O-methyladenosine-3'-phosphate
  modified_base 13: mod_base = OTHER; note = 2'-O-methyladenosine-3'-phosphate
  modified_base 14: mod_base = OTHER; note = 2'-O-methylcytidine-3'-phosphate
  modified_base 15: mod_base = OTHER; note = 2'-O-methyladenosine-3'-phosphate
  modified_base 16: mod_base = OTHER; note = 2'-O-methyluridine-3'-phosphate
  modified_base 17: mod_base = OTHER; note = 2'-O-methylguanosine-3'-phosphate
  modified_base 18: mod_base = OTHER; note = 2'-O-methylcytidine-3'-phosphate
  modified_base 19: mod_base = OTHER; note = 2'-O-methylcytidine-3'-phosphate
  modified_base 20: mod_base = OTHER; note = 2'-O-methyluridine-3'-phosphate
  modified_base 21: mod_base = OTHER; note = 2'-O-methyladenosine-3'-phosphate N-[tris(GalNAc-alkyl)-amidodecanoyl)]-4-hydroxyprolinol Hyp-(GalNAc-alkyl)3
ctccttcactgaacatgccta

SEQ ID NO: 3634 - RNA, 21 nt, synthetic construct
  source 1..21: mol_type = other RNA; note = Description of Artificial Sequence: Synthetic oligonucleotide
  modified_base 1: mod_base = OTHER; note = 2'-O-methylcytidine-3'-phosphorothioate
  modified_base 2: mod_base = OTHER; note = 2'-O-methyladenosine-3'-phosphorothioate
  modified_base 3: mod_base = OTHER; note = 2'-O-methyluridine-3'-phosphate
  modified_base 4: mod_base = OTHER; note = 2'-O-methylguanosine-3'-phosphate
  modified_base 5: mod_base = OTHER; note = 2'-O-methylcytidine-3'-phosphate
  modified_base 6: mod_base = OTHER; note = 2'-O-methylcytidine-3'-phosphate
  modified_base 7: mod_base = OTHER; note = 2'-fluorouridine-3'-phosphate
  modified_base 8: mod_base = OTHER; note = 2'-O-methyladenosine-3'-phosphate
  modified_base 9: mod_base = OTHER; note = 2'-fluoroguanosine-3'-phosphate
  modified_base 10: mod_base = OTHER; note = 2'-fluorouridine-3'-phosphate
  modified_base 11: mod_base = OTHER; note = 2'-fluorocytidine-3'-phosphate
  modified_base 12: mod_base = OTHER; note = 2'-O-methylcytidine-3'-phosphate
  modified_base 13: mod_base = OTHER; note = 2'-O-methyladenosine-3'-phosphate
  modified_base 14: mod_base = OTHER; note = 2'-O-methyladenosine-3'-phosphate
  modified_base 15: mod_base = OTHER; note = 2'-O-methylcytidine-3'-phosphate
  modified_base 16: mod_base = OTHER; note = 2'-O-methyladenosine-3'-phosphate
  modified_base 17: mod_base = OTHER; note = 2'-O-methyluridine-3'-phosphate
  modified_base 18: mod_base = OTHER; note = 2'-O-methyluridine-3'-phosphate
  modified_base 19: mod_base = OTHER; note = 2'-O-methyluridine-3'-phosphate
  modified_base 20: mod_base = OTHER; note = 2'-O-methyluridine-3'-phosphate
  modified_base 21: mod_base = OTHER; note = 2'-O-methyluridine-3'-phosphate N-[tris(GalNAc-alkyl)-amidodecanoyl)]-4-hydroxyprolinol Hyp-(GalNAc-alkyl)3
catgcctagtccaacattttt

SEQ ID NO: 3635 - RNA, 21 nt, synthetic construct
  source 1..21: mol_type = other RNA; note = Description of Artificial Sequence: Synthetic oligonucleotide
  modified_base 1: mod_base = OTHER; note = 2'-O-methyluridine-3'-phosphorothioate
  modified_base 2: mod_base = OTHER; note = 2'-O-methylguanosine-3'-phosphorothioate
  modified_base 3: mod_base = OTHER; note = 2'-O-methylcytidine-3'-phosphate
  modified_base 4: mod_base = OTHER; note = 2'-O-methylcytidine-3'-phosphate
  modified_base 5: mod_base = OTHER; note = 2'-O-methyladenosine-3'-phosphate
  modified_base 6: mod_base = OTHER; note = 2'-O-methyluridine-3'-phosphate
  modified_base 7: mod_base = OTHER; note = 2'-fluorocytidine-3'-phosphate
  modified_base 8: mod_base = OTHER; note = 2'-O-methyladenosine-3'-phosphate
  modified_base 9: mod_base = OTHER; note = 2'-fluoroguanosine-3'-phosphate
  modified_base 10: mod_base = OTHER; note = 2'-fluorouridine-3'-phosphate
  modified_base 11: mod_base = OTHER; note = 2'-fluoroadenosine-3'-phosphate
  modified_base 12: mod_base = OTHER; note = 2'-O-methyluridine-3'-phosphate
  modified_base 13: mod_base = OTHER; note = 2'-O-methylcytidine-3'-phosphate
  modified_base 14: mod_base = OTHER; note = 2'-O-methyluridine-3'-phosphate
  modified_base 15: mod_base = OTHER; note = 2'-O-methyluridine-3'-phosphate
  modified_base 16: mod_base = OTHER; note = 2'-O-methyladenosine-3'-phosphate
  modified_base 17: mod_base = OTHER; note = 2'-O-methyladenosine-3'-phosphate
  modified_base 18: mod_base = OTHER; note = 2'-O-methyluridine-3'-phosphate
  modified_base 19: mod_base = OTHER; note = 2'-O-methylguanosine-3'-phosphate
  modified_base 20: mod_base = OTHER; note = 2'-O-methyladenosine-3'-phosphate
  modified_base 21: mod_base = OTHER; note = 2'-O-methyladenosine-3'-phosphate N-[tris(GalNAc-alkyl)-amidodecanoyl)]-4-hydroxyprolinol Hyp-(GalNAc-alkyl)3
tgccatcagtatcttaatgaa

SEQ ID NO: 3636 - RNA, 21 nt, synthetic construct
  source 1..21: mol_type = other RNA; note = Description of Artificial Sequence: Synthetic oligonucleotide
  modified_base 1: mod_base = OTHER; note = 2'-O-methylguanosine-3'-phosphorothioate
  modified_base 2: mod_base = OTHER; note = 2'-O-methylcytidine-3'-phosphorothioate
  modified_base 3: mod_base = OTHER; note = 2'-O-methylcytidine-3'-phosphate
  modified_base 4: mod_base = OTHER; note = 2'-O-methyladenosine-3'-phosphate
  modified_base 5: mod_base = OTHER; note = 2'-O-methyluridine-3'-phosphate
  modified_base 6: mod_base = OTHER; note = 2'-O-methylcytidine-3'-phosphate
  modified_base 7: mod_base = OTHER; note = 2'-fluoroadenosine-3'-phosphate
  modified_base 8: mod_base = OTHER; note = 2'-O-methylguanosine-3'-phosphate
  modified_base 9: mod_base = OTHER; note = 2'-fluorouridine-3'-phosphate
  modified_base 10: mod_base = OTHER; note = 2'-fluoroadenosine-3'-phosphate
  modified_base 11: mod_base = OTHER; note = 2'-fluorouridine-3'-phosphate
  modified_base 12: mod_base = OTHER; note = 2'-O-methylcytidine-3'-phosphate
  modified_base 13: mod_base = OTHER; note = 2'-O-methyluridine-3'-phosphate
  modified_base 14: mod_base = OTHER; note = 2'-O-methyluridine-3'-phosphate
  modified_base 15: mod_base = OTHER; note = 2'-O-methyladenosine-3'-phosphate
  modified_base 16: mod_base = OTHER; note = 2'-O-methyladenosine-3'-phosphate
  modified_base 17: mod_base = OTHER; note = 2'-O-methyluridine-3'-phosphate
  modified_base 18: mod_base = OTHER; note = 2'-O-methylguanosine-3'-phosphate
  modified_base 19: mod_base = OTHER; note = 2'-O-methyladenosine-3'-phosphate
  modified_base 20: mod_base = OTHER; note = 2'-O-methyladenosine-3'-phosphate
  modified_base 21: mod_base = OTHER; note = 2'-O-methyladenosine-3'-phosphate N-[tris(GalNAc-alkyl)-amidodecanoyl)]-4-hydroxyprolinol Hyp-(GalNAc-alkyl)3
gccatcagtatcttaatgaaa

SEQ ID NO: 3637 - RNA, 21 nt, synthetic construct
  source 1..21: mol_type = other RNA; note = Description of Artificial Sequence: Synthetic oligonucleotide
  modified_base 1: mod_base = OTHER; note = 2'-O-methyluridine-3'-phosphorothioate
  modified_base 2: mod_base = OTHER; note = 2'-O-methyluridine-3'-phosphorothioate
  modified_base 3: mod_base = OTHER; note = 2'-O-methyladenosine-3'-phosphate
  modified_base 4: mod_base = OTHER; note = 2'-O-methylguanosine-3'-phosphate
  modified_base 5: mod_base = OTHER; note = 2'-O-methyladenosine-3'-phosphate
  modified_base 6: mod_base = OTHER; note = 2'-O-methyladenosine-3'-phosphate
  modified_base 7: mod_base = OTHER; note = 2'-fluorocytidine-3'-phosphate
  modified_base 8: mod_base = OTHER; note = 2'-O-methyladenosine-3'-phosphate
  modified_base 9: mod_base = OTHER; note = 2'-fluorocytidine-3'-phosphate
  modified_base 10: mod_base = OTHER; note = 2'-fluorocytidine-3'-phosphate
  modified_base 11: mod_base = OTHER; note = 2'-fluoroadenosine-3'-phosphate
  modified_base 12: mod_base = OTHER; note = 2'-O-methyladenosine-3'-phosphate
  modified_base 13: mod_base = OTHER; note = 2'-O-methyladenosine-3'-phosphate
  modified_base 14: mod_base = OTHER; note = 2'-O-methylguanosine-3'-phosphate
  modified_base 15: mod_base = OTHER; note = 2'-O-methyladenosine-3'-phosphate
  modified_base 16: mod_base = OTHER; note = 2'-O-methyluridine-3'-phosphate
  modified_base 17: mod_base = OTHER; note = 2'-O-methyluridine-3'-phosphate
  modified_base 18: mod_base = OTHER; note = 2'-O-methylguanosine-3'-phosphate
  modified_base 19: mod_base = OTHER; note = 2'-O-methyluridine-3'-phosphate
  modified_base 20: mod_base = OTHER; note = 2'-O-methylcytidine-3'-phosphate
  modified_base 21: mod_base = OTHER; note = 2'-O-methyluridine-3'-phosphate N-[tris(GalNAc-alkyl)-amidodecanoyl)]-4-hydroxyprolinol Hyp-(GalNAc-alkyl)3
ttagaacaccaaagattgtct

SEQ ID NO: 3638 - RNA, 21 nt, synthetic construct
  source 1..21: mol_type = other RNA; note = Description of Artificial Sequence: Synthetic oligonucleotide
  modified_base 1: mod_base = OTHER; note = 2'-O-methyladenosine-3'-phosphorothioate
  modified_base 2: mod_base = OTHER; note = 2'-O-methyluridine-3'-phosphorothioate
  modified_base 3: mod_base = OTHER; note = 2'-O-methylcytidine-3'-phosphate
  modified_base 4: mod_base = OTHER; note = 2'-O-methyladenosine-3'-phosphate
  modified_base 5: mod_base = OTHER; note = 2'-O-methyluridine-3'-phosphate
  modified_base 6: mod_base = OTHER; note = 2'-O-methyluridine-3'-phosphate
  modified_base 7: mod_base = OTHER; note = 2'-fluorouridine-3'-phosphate
  modified_base 8: mod_base = OTHER; note = 2'-O-methylcytidine-3'-phosphate
  modified_base 9: mod_base = OTHER; note = 2'-fluoroadenosine-3'-phosphate
  modified_base 10: mod_base = OTHER; note = 2'-fluorocytidine-3'-phosphate
  modified_base 11: mod_base = OTHER; note = 2'-fluorouridine-3'-phosphate
  modified_base 12: mod_base = OTHER; note = 2'-O-methylguanosine-3'-phosphate
  modified_base 13: mod_base = OTHER; note = 2'-O-methyluridine-3'-phosphate
  modified_base 14: mod_base = OTHER; note = 2'-O-methylcytidine-3'-phosphate
  modified_base 15: mod_base = OTHER; note = 2'-O-methyluridine-3'-phosphate
  modified_base 16: mod_base = OTHER; note = 2'-O-methyladenosine-3'-phosphate
  modified_base 17: mod_base = OTHER; note = 2'-O-methylguanosine-3'-phosphate
  modified_base 18: mod_base = OTHER; note = 2'-O-methylguanosine-3'-phosphate
  modified_base 19: mod_base = OTHER; note = 2'-O-methylcytidine-3'-phosphate
  modified_base 20: mod_base = OTHER; note = 2'-O-methyluridine-3'-phosphate
  modified_base 21: mod_base = OTHER; note = 2'-O-methyladenosine-3'-phosphate N-[tris(GalNAc-alkyl)-amidodecanoyl)]-4-hydroxyprolinol Hyp-(GalNAc-alkyl)3
atcatttcactgtctaggcta

SEQ ID NO: 3639 - RNA, 21 nt, synthetic construct
  source 1..21: mol_type = other RNA; note = Description of Artificial Sequence: Synthetic oligonucleotide
  modified_base 1: mod_base = OTHER; note = 2'-O-methyluridine-3'-phosphorothioate
  modified_base 2: mod_base = OTHER; note = 2'-O-methylcytidine-3'-phosphorothioate
  modified_base 3: mod_base = OTHER; note = 2'-O-methyladenosine-3'-phosphate
  modified_base 4: mod_base = OTHER; note = 2'-O-methylcytidine-3'-phosphate
  modified_base 5: mod_base = OTHER; note = 2'-O-methyluridine-3'-phosphate
  modified_base 6: mod_base = OTHER; note = 2'-O-methylguanosine-3'-phosphate
  modified_base 7: mod_base = OTHER; note = 2'-fluorouridine-3'-phosphate
  modified_base 8: mod_base = OTHER; note = 2'-O-methylcytidine-3'-phosphate
  modified_base 9: mod_base = OTHER; note = 2'-fluorouridine-3'-phosphate
  modified_base 10: mod_base = OTHER; note = 2'-fluoroadenosine-3'-phosphate
  modified_base 11: mod_base = OTHER; note = 2'-fluoroguanosine-3'-phosphate
  modified_base 12: mod_base = OTHER; note = 2'-O-methylguanosine-3'-phosphate
  modified_base 13: mod_base = OTHER; note = 2'-O-methylcytidine-3'-phosphate
  modified_base 14: mod_base = OTHER; note = 2'-O-methyluridine-3'-phosphate
  modified_base 15: mod_base = OTHER; note = 2'-O-methyladenosine-3'-phosphate
  modified_base 16: mod_base = OTHER; note = 2'-O-methylcytidine-3'-phosphate
  modified_base 17: mod_base = OTHER; note = 2'-O-methyladenosine-3'-phosphate
  modified_base 18: mod_base = OTHER; note = 2'-O-methyladenosine-3'-phosphate
  modified_base 19: mod_base = OTHER; note = 2'-O-methylcytidine-3'-phosphate
  modified_base 20: mod_base = OTHER; note = 2'-O-methyladenosine-3'-phosphate
  modified_base 21: mod_base = OTHER; note = 2'-O-methyladenosine-3'-phosphate N-[tris(GalNAc-alkyl)-amidodecanoyl)]-4-hydroxyprolinol Hyp-(GalNAc-alkyl)3
tcactgtctaggctacaacaa

SEQ ID NO: 3640 - RNA, 21 nt, synthetic construct
  source 1..21: mol_type = other RNA; note = Description of Artificial Sequence: Synthetic oligonucleotide
  modified_base 1: mod_base = OTHER; note = 2'-O-methylguanosine-3'-phosphorothioate
  modified_base 2: mod_base = OTHER; note = 2'-O-methylguanosine-3'-phosphorothioate
  modified_base 3: mod_base = OTHER; note = 2'-O-methyladenosine-3'-phosphate
  modified_base 4: mod_base = OTHER; note = 2'-O-methyluridine-3'-phosphate
  modified_base 5: mod_base = OTHER; note = 2'-O-methylcytidine-3'-phosphate
  modified_base 6: mod_base = OTHER; note = 2'-O-methylcytidine-3'-phosphate
  modified_base 7: mod_base = OTHER; note = 2'-fluoroadenosine-3'-phosphate
  modified_base 8: mod_base = OTHER; note = 2'-O-methylguanosine-3'-phosphate
  modified_base 9: mod_base = OTHER; note = 2'-fluorouridine-3'-phosphate
  modified_base 10: mod_base = OTHER; note = 2'-fluoroguanosine-3'-phosphate
  modified_base 11: mod_base = OTHER; note = 2'-fluorouridine-3'-phosphate
  modified_base 12: mod_base = OTHER; note = 2'-O-methyladenosine-3'-phosphate
  modified_base 13: mod_base = OTHER; note = 2'-O-methyluridine-3'-phosphate
  modified_base 14: mod_base = OTHER; note = 2'-O-methyladenosine-3'-phosphate
  modified_base 15: mod_base = OTHER; note = 2'-O-methyladenosine-3'-phosphate
  modified_base 16: mod_base = OTHER; note = 2'-O-methyladenosine-3'-phosphate
  modified_base 17: mod_base = OTHER; note = 2'-O-methyluridine-3'-phosphate
  modified_base 18: mod_base = OTHER; note = 2'-O-methylcytidine-3'-phosphate
  modified_base 19: mod_base = OTHER; note = 2'-O-methylcytidine-3'-phosphate
  modified_base 20: mod_base = OTHER; note = 2'-O-methyladenosine-3'-phosphate
  modified_base 21: mod_base = OTHER; note = 2'-O-methyladenosine-3'-phosphate N-[tris(GalNAc-alkyl)-amidodecanoyl)]-4-hydroxyprolinol Hyp-(GalNAc-alkyl)3
ggatccagtgtataaatccaa

SEQ ID NO: 3641 - RNA, 21 nt, synthetic construct
  source 1..21: mol_type = other RNA; note = Description of Artificial Sequence: Synthetic oligonucleotide
  modified_base 1: mod_base = OTHER; note = 2'-O-methylcytidine-3'-phosphorothioate
  modified_base 2: mod_base = OTHER; note = 2'-O-methyladenosine-3'-phosphorothioate
  modified_base 3: mod_base = OTHER; note = 2'-O-methyladenosine-3'-phosphate
  modified_base 4: mod_base = OTHER; note = 2'-O-methylcytidine-3'-phosphate
  modified_base 5: mod_base = OTHER; note = 2'-O-methyluridine-3'-phosphate
  modified_base 6: mod_base = OTHER; note = 2'-O-methyladenosine-3'-phosphate
  modified_base 7: mod_base = OTHER; note = 2'-fluorouridine-3'-phosphate
  modified_base 8: mod_base = OTHER; note = 2'-O-methylcytidine-3'-phosphate
  modified_base 9: mod_base = OTHER; note = 2'-fluorocytidine-3'-phosphate
  modified_base 10: mod_base = OTHER; note = 2'-fluoroadenosine-3'-phosphate
  modified_base 11: mod_base = OTHER; note = 2'-fluoroadenosine-3'-phosphate
  modified_base 12: mod_base = OTHER; note = 2'-O-methylguanosine-3'-phosphate
  modified_base 13: mod_base = OTHER; note = 2'-O-methyluridine-3'-phosphate
  modified_base 14: mod_base = OTHER; note = 2'-O-methylguanosine-3'-phosphate
  modified_base 15: mod_base = OTHER; note = 2'-O-methyluridine-3'-phosphate
  modified_base 16: mod_base = OTHER; note = 2'-O-methyluridine-3'-phosphate
  modified_base 17: mod_base = OTHER; note = 2'-O-methyladenosine-3'-phosphate
  modified_base 18: mod_base = OTHER; note = 2'-O-methyluridine-3'-phosphate
  modified_base 19: mod_base = OTHER; note = 2'-O-methyladenosine-3'-phosphate
  modified_base 20: mod_base = OTHER; note = 2'-O-methylcytidine-3'-phosphate
  modified_base 21: mod_base = OTHER; note = 2'-O-methyladenosine-3'-phosphate N-[tris(GalNAc-alkyl)-amidodecanoyl)]-4-hydroxyprolinol Hyp-(GalNAc-alkyl)3
caactatccaagtgttataca

SEQ ID NO: 3642 - RNA, 21 nt, synthetic construct
  source 1..21: mol_type = other RNA; note = Description of Artificial Sequence: Synthetic oligonucleotide
  modified_base 1: mod_base = OTHER; note = 2'-O-methyluridine-3'-phosphorothioate
  modified_base 2: mod_base = OTHER; note = 2'-O-methyluridine-3'-phosphorothioate
  modified_base 3: mod_base = OTHER; note = 2'-O-methylguanosine-3'-phosphate
  modified_base 4: mod_base = OTHER; note = 2'-O-methylguanosine-3'-phosphate
  modified_base 5: mod_base = OTHER; note = 2'-O-methyluridine-3'-phosphate
  modified_base 6: mod_base = OTHER; note = 2'-O-methyluridine-3'-phosphate
  modified_base 7: mod_base = OTHER; note = 2'-fluorocytidine-3'-phosphate
  modified_base 8: mod_base = OTHER; note = 2'-O-methylcytidine-3'-phosphate
  modified_base 9: mod_base = OTHER; note = 2'-fluoroadenosine-3'-phosphate
  modified_base 10: mod_base = OTHER; note = 2'-fluoroadenosine-3'-phosphate
  modified_base 11: mod_base = OTHER; note = 2'-fluoroguanosine-3'-phosphate
  modified_base 12: mod_base = OTHER; note = 2'-O-methyluridine-3'-phosphate
  modified_base 13: mod_base = OTHER; note = 2'-O-methylcytidine-3'-phosphate
  modified_base 14: mod_base = OTHER; note = 2'-O-methylcytidine-3'-phosphate
  modified_base 15: mod_base = OTHER; note = 2'-O-methyladenosine-3'-phosphate
  modified_base 16: mod_base = OTHER; note = 2'-O-methyladenosine-3'-phosphate
  modified_base 17: mod_base = OTHER; note = 2'-O-methyluridine-3'-phosphate
  modified_base 18: mod_base = OTHER; note = 2'-O-methyladenosine-3'-phosphate
  modified_base 19: mod_base = OTHER; note = 2'-O-methyluridine-3'-phosphate
  modified_base 20: mod_base = OTHER; note = 2'-O-methylguanosine-3'-phosphate
  modified_base 21: mod_base = OTHER; note = 2'-O-methyladenosine-3'-phosphate N-[tris(GalNAc-alkyl)-amidodecanoyl)]-4-hydroxyprolinol Hyp-(GalNAc-alkyl)3
ttggttccaagtccaatatga

SEQ ID NO: 3643 - RNA, 21 nt, synthetic construct
  source 1..21: mol_type = other RNA; note = Description of Artificial Sequence: Synthetic oligonucleotide
  modified_base 1: mod_base = OTHER; note = 2'-O-methyluridine-3'-phosphorothioate
  modified_base 2: mod_base = OTHER; note = 2'-O-methylguanosine-3'-phosphorothioate
  modified_base 3: mod_base = OTHER; note = 2'-O-methylcytidine-3'-phosphate
  modified_base 4: mod_base = OTHER; note = 2'-O-methyluridine-3'-phosphate
  modified_base 5: mod_base = OTHER; note = 2'-O-methyluridine-3'-phosphate
  modified_base 6: mod_base = OTHER; note = 2'-O-methyladenosine-3'-phosphate
  modified_base 7: mod_base = OTHER; note = 2'-fluorouridine-3'-phosphate
  modified_base 8: mod_base = OTHER; note = 2'-O-methylguanosine-3'-phosphate
  modified_base 9: mod_base = OTHER; note = 2'-fluoroadenosine-3'-phosphate
  modified_base 10: mod_base = OTHER; note = 2'-fluoroguanosine-3'-phosphate
  modified_base 11: mod_base = OTHER; note = 2'-fluoroguanosine-3'-phosphate
  modified_base 12: mod_base = OTHER; note = 2'-O-methyluridine-3'-phosphate
  modified_base 13: mod_base = OTHER; note = 2'-O-methylguanosine-3'-phosphate
  modified_base 14: mod_base = OTHER; note = 2'-O-methyladenosine-3'-phosphate
  modified_base 15: mod_base = OTHER; note = 2'-O-methyluridine-3'-phosphate
  modified_base 16: mod_base = OTHER; note = 2'-O-methylcytidine-3'-phosphate
  modified_base 17: mod_base = OTHER; note = 2'-O-methyladenosine-3'-phosphate
  modified_base 18: mod_base = OTHER; note = 2'-O-methyladenosine-3'-phosphate
  modified_base 19: mod_base = OTHER; note = 2'-O-methyladenosine-3'-phosphate
  modified_base 20: mod_base = OTHER; note = 2'-O-methylcytidine-3'-phosphate
  modified_base 21: mod_base = OTHER; note = 2'-O-methyluridine-3'-phosphate N-[tris(GalNAc-alkyl)-amidodecanoyl)]-4-hydroxyprolinol Hyp-(GalNAc-alkyl)3
tgcttatgaggtgatcaaact

SEQ ID NO: 3644 - RNA, 21 nt, synthetic construct
  source 1..21: mol_type = other RNA; note = Description of Artificial Sequence: Synthetic oligonucleotide
  modified_base 1: mod_base = OTHER; note = 2'-O-methyladenosine-3'-phosphorothioate
  modified_base 2: mod_base = OTHER; note = 2'-O-methyladenosine-3'-phosphorothioate
  modified_base 3: mod_base = OTHER; note = 2'-O-methyladenosine-3'-phosphate
  modified_base 4: mod_base = OTHER; note = 2'-O-methylcytidine-3'-phosphate
  modified_base 5: mod_base = OTHER; note = 2'-O-methyluridine-3'-phosphate
  modified_base 6: mod_base = OTHER; note = 2'-O-methylcytidine-3'-phosphate
  modified_base 7: mod_base = OTHER; note = 2'-fluoroadenosine-3'-phosphate
  modified_base 8: mod_base = OTHER; note = 2'-O-methyladenosine-3'-phosphate
  modified_base 9: mod_base = OTHER; note = 2'-fluoroadenosine-3'-phosphate
  modified_base 10: mod_base = OTHER; note = 2'-fluoroguanosine-3'-phosphate
  modified_base 11: mod_base = OTHER; note = 2'-fluoroguanosine-3'-phosphate
  modified_base 12: mod_base = OTHER; note = 2'-O-methylcytidine-3'-phosphate
  modified_base 13: mod_base = OTHER; note = 2'-O-methyluridine-3'-phosphate
  modified_base 14: mod_base = OTHER; note = 2'-O-methyladenosine-3'-phosphate
  modified_base 15: mod_base = OTHER; note = 2'-O-methylcytidine-3'-phosphate
  modified_base 16: mod_base = OTHER; note = 2'-O-methyladenosine-3'-phosphate
  modified_base 17: mod_base = OTHER; note = 2'-O-methylcytidine-3'-phosphate
  modified_base 18: mod_base = OTHER; note = 2'-O-methyladenosine-3'-phosphate
  modified_base 19: mod_base = OTHER; note = 2'-O-methyluridine-3'-phosphate
  modified_base 20: mod_base = OTHER; note = 2'-O-methylcytidine-3'-phosphate
  modified_base 21: mod_base = OTHER; note = 2'-O-methyladenosine-3'-phosphate N-[tris(GalNAc-alkyl)-amidodecanoyl)]-4-hydroxyprolinol Hyp-(GalNAc-alkyl)3
aaactcaaaggctacacatca

SEQ ID NO: 3645 - RNA, 21 nt, synthetic construct
  source 1..21: mol_type = other RNA; note = Description of Artificial Sequence: Synthetic oligonucleotide
  modified_base 1: mod_base = OTHER; note = 2'-O-methyluridine-3'-phosphorothioate
  modified_base 2: mod_base = OTHER; note = 2'-O-methylcytidine-3'-phosphorothioate
  modified_base 3: mod_base = OTHER; note = 2'-O-methyluridine-3'-phosphate
  modified_base 4: mod_base = OTHER; note = 2'-O-methylcytidine-3'-phosphate
  modified_base 5: mod_base = OTHER; note = 2'-O-methyladenosine-3'-phosphate
  modified_base 6: mod_base = OTHER; note = 2'-O-methylguanosine-3'-phosphate
  modified_base 7: mod_base = OTHER; note = 2'-fluoroadenosine-3'-phosphate
  modified_base 8: mod_base = OTHER; note = 2'-O-methylcytidine-3'-phosphate
  modified_base 9: mod_base = OTHER; note = 2'-fluorocytidine-3'-phosphate
  modified_base 10: mod_base = OTHER; note = 2'-fluorouridine-3'-phosphate
  modified_base 11: mod_base = OTHER; note = 2'-fluorouridine-3'-phosphate
  modified_base 12: mod_base = OTHER; note = 2'-O-methylguanosine-3'-phosphate
  modified_base 13: mod_base = OTHER; note = 2'-O-methyluridine-3'-phosphate
  modified_base 14: mod_base = OTHER; note = 2'-O-methylguanosine-3'-phosphate
  modified_base 15: mod_base = OTHER; note = 2'-O-methyladenosine-3'-phosphate
  modified_base 16: mod_base = OTHER; note = 2'-O-methyladenosine-3'-phosphate
  modified_base 17: mod_base = OTHER; note = 2'-O-methylguanosine-3'-phosphate
  modified_base 18: mod_base = OTHER; note = 2'-O-methylguanosine-3'-phosphate
  modified_base 19: mod_base = OTHER; note = 2'-O-methyluridine-3'-phosphate
  modified_base 20: mod_base = OTHER; note = 2'-O-methylguanosine-3'-phosphate
  modified_base 21: mod_base = OTHER; note = 2'-O-methyladenosine-3'-phosphate N-[tris(GalNAc-alkyl)-amidodecanoyl)]-4-hydroxyprolinol Hyp-(GalNAc-alkyl)3
tctcagaccttgtgaaggtga

SEQ ID NO: 3646 - RNA, 21 nt, synthetic construct
  source 1..21: mol_type = other RNA; note = Description of Artificial Sequence: Synthetic oligonucleotide
  modified_base 1: mod_base = OTHER; note = 2'-O-methyluridine-3'-phosphorothioate
  modified_base 2: mod_base = OTHER; note = 2'-O-methyladenosine-3'-phosphorothioate
  modified_base 3: mod_base = OTHER; note = 2'-O-methyladenosine-3'-phosphate
  modified_base 4: mod_base = OTHER; note = 2'-O-methyladenosine-3'-phosphate
  modified_base 5: mod_base = OTHER; note = 2'-O-methyladenosine-3'-phosphate
  modified_base 6: mod_base = OTHER; note = 2'-O-methyluridine-3'-phosphate
  modified_base 7: mod_base = OTHER; note = 2'-fluorocytidine-3'-phosphate
  modified_base 8: mod_base = OTHER; note = 2'-O-methylcytidine-3'-phosphate
  modified_base 9: mod_base = OTHER; note = 2'-fluoroadenosine-3'-phosphate
  modified_base 10: mod_base = OTHER; note = 2'-fluorocytidine-3'-phosphate
  modified_base 11: mod_base = OTHER; note = 2'-fluoroadenosine-3'-phosphate
  modified_base 12: mod_base = OTHER; note = 2'-O-methylguanosine-3'-phosphate
  modified_base 13: mod_base = OTHER; note = 2'-O-methylcytidine-3'-phosphate
  modified_base 14: mod_base = OTHER; note = 2'-O-methyluridine-3'-phosphate
  modified_base 15: mod_base = OTHER; note = 2'-O-methyladenosine-3'-phosphate
  modified_base 16: mod_base = OTHER; note = 2'-O-methyluridine-3'-phosphate
  modified_base 17: mod_base = OTHER; note = 2'-O-methyladenosine-3'-phosphate
  modified_base 18: mod_base = OTHER; note = 2'-O-methyluridine-3'-phosphate
  modified_base 19: mod_base = OTHER; note = 2'-O-methylcytidine-3'-phosphate
  modified_base 20: mod_base = OTHER; note = 2'-O-methylcytidine-3'-phosphate
  modified_base 21: mod_base = OTHER; note = 2'-O-methyluridine-3'-phosphate N-[tris(GalNAc-alkyl)-amidodecanoyl)]-4-hydroxyprolinol Hyp-(GalNAc-alkyl)3
taaaatccacagctatatcct

SEQ ID NO: 3647 - RNA, 21 nt, synthetic construct
  source 1..21: mol_type = other RNA; note = Description of Artificial Sequence: Synthetic oligonucleotide
  modified_base 1: mod_base = OTHER; note = 2'-O-methylcytidine-3'-phosphorothioate
  modified_base 2: mod_base = OTHER; note = 2'-O-methylcytidine-3'-phosphorothioate
  modified_base 3: mod_base = OTHER; note = 2'-O-methyluridine-3'-phosphate
  modified_base 4: mod_base = OTHER; note = 2'-O-methyluridine-3'-phosphate
  modified_base 5: mod_base = OTHER; note = 2'-O-methylcytidine-3'-phosphate
  modified_base 6: mod_base = OTHER; note = 2'-O-methyladenosine-3'-phosphate
  modified_base 7: mod_base = OTHER; note = 2'-fluorocytidine-3'-phosphate
  modified_base 8: mod_base = OTHER; note = 2'-O-methyluridine-3'-phosphate
  modified_base 9: mod_base = OTHER; note = 2'-fluoroguanosine-3'-phosphate
  modified_base 10: mod_base = OTHER; note = 2'-fluoroadenosine-3'-phosphate
  modified_base 11: mod_base = OTHER; note = 2'-fluoroadenosine-3'-phosphate
  modified_base 12: mod_base = OTHER; note = 2'-O-methylcytidine-3'-phosphate
  modified_base 13: mod_base = OTHER; note = 2'-O-methyladenosine-3'-phosphate
  modified_base 14: mod_base = OTHER; note = 2'-O-methyluridine-3'-phosphate
  modified_base 15: mod_base = OTHER; note = 2'-O-methylguanosine-3'-phosphate
  modified_base 16: mod_base = OTHER; note = 2'-O-methylcytidine-3'-phosphate
  modified_base 17: mod_base = OTHER; note = 2'-O-methylcytidine-3'-phosphate
  modified_base 18: mod_base = OTHER; note = 2'-O-methyluridine-3'-phosphate
  modified_base 19: mod_base = OTHER; note = 2'-O-methyladenosine-3'-phosphate
  modified_base 20: mod_base = OTHER; note = 2'-O-methylguanosine-3'-phosphate
  modified_base 21: mod_base = OTHER; note = 2'-O-methyluridine-3'-phosphate N-[tris(GalNAc-alkyl)-amidodecanoyl)]-4-hydroxyprolinol Hyp-(GalNAc-alkyl)3
ccttcactgaacatgcctagt

SEQ ID NO: 3648 - RNA, 21 nt, synthetic construct
  source 1..21: mol_type = other RNA; note = Description of Artificial Sequence: Synthetic oligonucleotide
  modified_base 1: mod_base = OTHER; note = 2'-O-methylguanosine-3'-phosphorothioate
  modified_base 2: mod_base = OTHER; note = 2'-O-methylguanosine-3'-phosphorothioate
  modified_base 3: mod_base = OTHER; note = 2'-O-methylguanosine-3'-phosphate
  modified_base 4: mod_base = OTHER; note = 2'-O-methyladenosine-3'-phosphate
  modified_base 5: mod_base = OTHER; note = 2'-O-methyluridine-3'-phosphate
  modified_base 6: mod_base = OTHER; note = 2'-O-methylcytidine-3'-phosphate
  modified_base 7: mod_base = OTHER; note = 2'-fluorocytidine-3'-phosphate
  modified_base 8: mod_base = OTHER; note = 2'-O-methyladenosine-3'-phosphate
  modified_base 9: mod_base = OTHER; note = 2'-fluoroguanosine-3'-phosphate
  modified_base 10: mod_base = OTHER; note = 2'-fluorouridine-3'-phosphate
  modified_base 11: mod_base = OTHER; note = 2'-fluoroguanosine-3'-phosphate
  modified_base 12: mod_base = OTHER; note = 2'-O-methyluridine-3'-phosphate
  modified_base 13: mod_base = OTHER; note = 2'-O-methyladenosine-3'-phosphate
  modified_base 14: mod_base = OTHER; note = 2'-O-methyluridine-3'-phosphate
  modified_base 15: mod_base = OTHER; note = 2'-O-methyladenosine-3'-phosphate
  modified_base 16: mod_base = OTHER; note = 2'-O-methyladenosine-3'-phosphate
  modified_base 17: mod_base = OTHER; note = 2'-O-methyladenosine-3'-phosphate
  modified_base 18: mod_base = OTHER; note = 2'-O-methyluridine-3'-phosphate
  modified_base 19: mod_base = OTHER; note = 2'-O-methylcytidine-3'-phosphate
  modified_base 20: mod_base = OTHER; note = 2'-O-methylcytidine-3'-phosphate
  modified_base 21: mod_base = OTHER; note = 2'-O-methyladenosine-3'-phosphate N-[tris(GalNAc-alkyl)-amidodecanoyl)]-4-hydroxyprolinol Hyp-(GalNAc-alkyl)3
gggatccagtgtataaatcca

SEQ ID NO: 3649 - RNA, 21 nt, synthetic construct
  source 1..21: mol_type = other RNA; note = Description of Artificial Sequence: Synthetic oligonucleotide
  modified_base 1: mod_base = OTHER; note = 2'-O-methylcytidine-3'-phosphorothioate
  modified_base 2: mod_base = OTHER; note = 2'-O-methyladenosine-3'-phosphorothioate
  modified_base 3: mod_base = OTHER; note = 2'-O-methyladenosine-3'-phosphate
  modified_base 4: mod_base = OTHER; note = 2'-O-methyluridine-3'-phosphate
  modified_base 5: mod_base = OTHER; note = 2'-O-methyladenosine-3'-phosphate
  modified_base 6: mod_base = OTHER; note = 2'-O-methyladenosine-3'-phosphate
  modified_base 7: mod_base = OTHER; note = 2'-fluoroadenosine-3'-phosphate
  modified_base 8: mod_base = OTHER; note = 2'-O-methylcytidine-3'-phosphate
  modified_base 9: mod_base = OTHER; note = 2'-fluorocytidine-3'-phosphate
  modified_base 10: mod_base = OTHER; note = 2'-fluorouridine-3'-phosphate
  modified_base 11: mod_base = OTHER; note = 2'-fluorouridine-3'-phosphate
  modified_base 12: mod_base = OTHER; note = 2'-O-methylguanosine-3'-phosphate
  modified_base 13: mod_base = OTHER; note = 2'-O-methyladenosine-3'-phosphate
  modified_base 14: mod_base = OTHER; note = 2'-O-methyladenosine-3'-phosphate
  modified_base 15: mod_base = OTHER; note = 2'-O-methylcytidine-3'-phosphate
  modified_base 16: mod_base = OTHER; note = 2'-O-methyladenosine-3'-phosphate
  modified_base 17: mod_base = OTHER; note = 2'-O-methylguanosine-3'-phosphate
  modified_base 18: mod_base = OTHER; note = 2'-O-methyluridine-3'-phosphate
  modified_base 19: mod_base = OTHER; note = 2'-O-methylguanosine-3'-phosphate
  modified_base 20: mod_base = OTHER; note = 2'-O-methyladenosine-3'-phosphate
  modified_base 21: mod_base = OTHER; note = 2'-O-methyladenosine-3'-phosphate N-[tris(GalNAc-alkyl)-amidodecanoyl)]-4-hydroxyprolinol Hyp-(GalNAc-alkyl)3
caataaaccttgaacagtgaa

SEQ ID NO: 3650 - RNA, 21 nt, synthetic construct
  source 1..21: mol_type = other RNA; note = Description of Artificial Sequence: Synthetic oligonucleotide
  modified_base 1: mod_base = OTHER; note = 2'-O-methylguanosine-3'-phosphorothioate
  modified_base 2: mod_base = OTHER; note = 2'-O-methylguanosine-3'-phosphorothioate
  modified_base 3: mod_base = OTHER; note = 2'-O-methylcytidine-3'-phosphate
  modified_base 4: mod_base = OTHER; note = 2'-O-methylcytidine-3'-phosphate
  modified_base 5: mod_base = OTHER; note = 2'-O-methyluridine-3'-phosphate
  modified_base 6: mod_base = OTHER; note = 2'-O-methylguanosine-3'-phosphate
  modified_base 7: mod_base = OTHER; note = 2'-fluorouridine-3'-phosphate
  modified_base 8: mod_base = OTHER; note = 2'-O-methylguanosine-3'-phosphate
  modified_base 9: mod_base = OTHER; note = 2'-fluorocytidine-3'-phosphate
  modified_base 10: mod_base = OTHER; note = 2'-fluorocytidine-3'-phosphate
  modified_base 11: mod_base = OTHER; note = 2'-fluoroadenosine-3'-phosphate
  modified_base 12: mod_base = OTHER; note = 2'-O-methyluridine-3'-phosphate
  modified_base 13: mod_base = OTHER; note = 2'-O-methylcytidine-3'-phosphate
  modified_base 14: mod_base = OTHER; note = 2'-O-methyladenosine-3'-phosphate
  modified_base 15: mod_base = OTHER; note = 2'-O-methylguanosine-3'-phosphate
  modified_base 16: mod_base = OTHER; note = 2'-O-methyluridine-3'-phosphate
  modified_base 17: mod_base = OTHER; note = 2'-O-methyladenosine-3'-phosphate
  modified_base 18: mod_base = OTHER; note = 2'-O-methyluridine-3'-phosphate
  modified_base 19: mod_base = OTHER; note = 2'-O-methylcytidine-3'-phosphate
  modified_base 20: mod_base = OTHER; note = 2'-O-methyluridine-3'-phosphate
  modified_base 21: mod_base = OTHER; note = 2'-O-methyluridine-3'-phosphate N-[tris(GalNAc-alkyl)-amidodecanoyl)]-4-hydroxyprolinol Hyp-(GalNAc-alkyl)3
ggcctgtgccatcagtatctt

SEQ ID NO: 3651 - RNA, 21 nt, synthetic construct
  source 1..21: mol_type = other RNA; note = Description of Artificial Sequence: Synthetic oligonucleotide
  modified_base 1: mod_base = OTHER; note = 2'-O-methyluridine-3'-phosphorothioate
  modified_base 2: mod_base = OTHER; note = 2'-O-methyluridine-3'-phosphorothioate
  modified_base 3: mod_base = OTHER; note = 2'-O-methylguanosine-3'-phosphate
  modified_base 4: mod_base = OTHER; note = 2'-O-methyluridine-3'-phosphate
  modified_base 5: mod_base = OTHER; note = 2'-O-methyluridine-3'-phosphate
  modified_base 6: mod_base = OTHER; note = 2'-O-methylguanosine-3'-phosphate
  modified_base 7: mod_base = OTHER; note = 2'-fluoroadenosine-3'-phosphate
  modified_base 8: mod_base = OTHER; note = 2'-O-methyluridine-3'-phosphate
  modified_base 9: mod_base = OTHER; note = 2'-fluoroguanosine-3'-phosphate
  modified_base 10: mod_base = OTHER; note = 2'-fluorouridine-3'-phosphate
  modified_base 11: mod_base = OTHER; note = 2'-fluorocytidine-3'-phosphate
  modified_base 12: mod_base = OTHER; note = 2'-O-methyladenosine-3'-phosphate
  modified_base 13: mod_base = OTHER; note = 2'-O-methyluridine-3'-phosphate
  modified_base 14: mod_base = OTHER; note = 2'-O-methylcytidine-3'-phosphate
  modified_base 15: mod_base = OTHER; note = 2'-O-methylguanosine-3'-phosphate
  modified_base 16: mod_base = OTHER; note = 2'-O-methyladenosine-3'-phosphate
  modified_base 17: mod_base = OTHER; note = 2'-O-methyladenosine-3'-phosphate
  modified_base 18: mod_base = OTHER; note = 2'-O-methylguanosine-3'-phosphate
  modified_base 19: mod_base = OTHER; note = 2'-O-methyladenosine-3'-phosphate
  modified_base 20: mod_base = OTHER; note = 2'-O-methylcytidine-3'-phosphate
  modified_base 21: mod_base = OTHER; note = 2'-O-methyladenosine-3'-phosphate N-[tris(GalNAc-alkyl)-amidodecanoyl)]-4-hydroxyprolinol Hyp-(GalNAc-alkyl)3
ttgttgatgtcatcgaagaca

SEQ ID NO: 3652 - RNA, 21 nt, synthetic construct
  source 1..21: mol_type = other RNA; note = Description of Artificial Sequence: Synthetic oligonucleotide
  modified_base 1: mod_base = OTHER; note = 2'-O-methylguanosine-3'-phosphorothioate
  modified_base 2: mod_base = OTHER; note = 2'-O-methylguanosine-3'-phosphorothioate
  modified_base 3: mod_base = OTHER; note = 2'-O-methyladenosine-3'-phosphate
  modified_base 4: mod_base = OTHER; note = 2'-O-methyluridine-3'-phosphate
  modified_base 5: mod_base = OTHER; note = 2'-O-methylcytidine-3'-phosphate
  modified_base 6: mod_base = OTHER; note = 2'-O-methyluridine-3'-phosphate
  modified_base 7: mod_base = OTHER; note = 2'-fluorouridine-3'-phosphate
  modified_base 8: mod_base = OTHER; note = 2'-O-methyladenosine-3'-phosphate
  modified_base 9: mod_base = OTHER; note = 2'-fluorouridine-3'-phosphate
  modified_base 10: mod_base = OTHER; note = 2'-fluorouridine-3'-phosphate
  modified_base 11: mod_base = OTHER; note = 2'-fluorouridine-3'-phosphate
  modified_base 12: mod_base = OTHER; note = 2'-O-methyluridine-3'-phosphate
  modified_base 13: mod_base = OTHER; note = 2'-O-methylguanosine-3'-phosphate
  modified_base 14: mod_base = OTHER; note = 2'-O-methyluridine-3'-phosphate
  modified_base 15: mod_base = OTHER; note = 2'-O-methylguanosine-3'-phosphate
  modified_base 16: mod_base = OTHER; note = 2'-O-methyladenosine-3'-phosphate
  modified_base 17: mod_base = OTHER; note = 2'-O-methyladenosine-3'-phosphate
  modified_base 18: mod_base = OTHER; note = 2'-O-methylcytidine-3'-phosphate
  modified_base 19: mod_base = OTHER; note = 2'-O-methyluridine-3'-phosphate
  modified_base 20: mod_base = OTHER; note = 2'-O-methyladenosine-3'-phosphate
  modified_base 21: mod_base = OTHER; note = 2'-O-methyluridine-3'-phosphate N-[tris(GalNAc-alkyl)-amidodecanoyl)]-4-hydroxyprolinol Hyp-(GalNAc-alkyl)3
ggatcttattttgtgaactat

SEQ ID NO: 3653 - RNA, 21 nt, synthetic construct
  source 1..21: mol_type = other RNA; note = Description of Artificial Sequence: Synthetic oligonucleotide
  modified_base 1: mod_base = OTHER; note = 2'-O-methyladenosine-3'-phosphorothioate
  modified_base 2: mod_base = OTHER; note = 2'-O-methyladenosine-3'-phosphorothioate
  modified_base 3: mod_base = OTHER; note = 2'-O-methylguanosine-3'-phosphate
  modified_base 4: mod_base = OTHER; note = 2'-O-methylguanosine-3'-phosphate
  modified_base 5: mod_base = OTHER; note = 2'-O-methyladenosine-3'-phosphate
  modified_base 6: mod_base = OTHER; note = 2'-O-methyluridine-3'-phosphate
  modified_base 7: mod_base = OTHER; note = 2'-fluorocytidine-3'-phosphate
  modified_base 8: mod_base = OTHER; note = 2'-O-methyluridine-3'-phosphate
  modified_base 9: mod_base = OTHER; note = 2'-fluorouridine-3'-phosphate
  modified_base 10: mod_base = OTHER; note = 2'-fluoroadenosine-3'-phosphate
  modified_base 11: mod_base = OTHER; note = 2'-fluorouridine-3'-phosphate
  modified_base 12: mod_base = OTHER; note = 2'-O-methyluridine-3'-phosphate
  modified_base 13: mod_base = OTHER; note = 2'-O-methyluridine-3'-phosphate
  modified_base 14: mod_base = OTHER; note = 2'-O-methyluridine-3'-phosphate
  modified_base 15: mod_base = OTHER; note = 2'-O-methylguanosine-3'-phosphate
  modified_base 16: mod_base = OTHER; note = 2'-O-methyluridine-3'-phosphate
  modified_base 17: mod_base = OTHER; note = 2'-O-methylguanosine-3'-phosphate
  modified_base 18: mod_base = OTHER; note = 2'-O-methyladenosine-3'-phosphate
  modified_base 19: mod_base = OTHER; note = 2'-O-methyladenosine-3'-phosphate
  modified_base 20: mod_base = OTHER; note = 2'-O-methylcytidine-3'-phosphate
  modified_base 21: mod_base = OTHER; note = 2'-O-methyluridine-3'-phosphate N-[tris(GalNAc-alkyl)-amidodecanoyl)]-4-hydroxyprolinol Hyp-(GalNAc-alkyl)3
aaggatcttattttgtgaact

SEQ ID NO: 3654 - RNA, 21 nt, synthetic construct
  source 1..21: mol_type = other RNA; note = Description of Artificial Sequence: Synthetic oligonucleotide
  modified_base 1: mod_base = OTHER; note = 2'-O-methyladenosine-3'-phosphorothioate
  modified_base 2: mod_base = OTHER; note = 2'-O-methyluridine-3'-phosphorothioate
  modified_base 3: mod_base = OTHER; note = 2'-O-methylcytidine-3'-phosphate
  modified_base 4: mod_base = OTHER; note = 2'-O-methyladenosine-3'-phosphate
  modified_base 5: mod_base = OTHER; note = 2'-O-methyluridine-3'-phosphate
  modified_base 6: mod_base = OTHER; note = 2'-O-methylguanosine-3'-phosphate
  modified_base 7: mod_base = OTHER; note = 2'-fluorouridine-3'-phosphate
  modified_base 8: mod_base = OTHER; note = 2'-O-methylcytidine-3'-phosphate
  modified_base 9: mod_base = OTHER; note = 2'-fluorouridine-3'-phosphate
  modified_base 10: mod_base = OTHER; note = 2'-fluorouridine-3'-phosphate
  modified_base 11: mod_base = OTHER; note = 2'-fluoroguanosine-3'-phosphate
  modified_base 12: mod_base = OTHER; note = 2'-O-methyluridine-3'-phosphate
  modified_base 13: mod_base = OTHER; note = 2'-O-methylguanosine-3'-phosphate
  modified_base 14: mod_base = OTHER; note = 2'-O-methylcytidine-3'-phosphate
  modified_base 15: mod_base = OTHER; note = 2'-O-methyladenosine-3'-phosphate
  modified_base 16: mod_base = OTHER; note = 2'-O-methyluridine-3'-phosphate
  modified_base 17: mod_base = OTHER; note = 2'-O-methyladenosine-3'-phosphate
  modified_base 18: mod_base = OTHER; note = 2'-O-methyladenosine-3'-phosphate
  modified_base 19: mod_base = OTHER; note = 2'-O-methyluridine-3'-phosphate
  modified_base 20: mod_base = OTHER; note = 2'-O-methyluridine-3'-phosphate
  modified_base 21: mod_base = OTHER; note = 2'-O-methyladenosine-3'-phosphate N-[tris(GalNAc-alkyl)-amidodecanoyl)]-4-hydroxyprolinol Hyp-(GalNAc-alkyl)3
atcatgtcttgtgcataatta

SEQ ID NO: 3655 - RNA, 21 nt, synthetic construct
  source 1..21: mol_type = other RNA; note = Description of Artificial Sequence: Synthetic oligonucleotide
  modified_base 1: mod_base = OTHER; note = 2'-O-methyluridine-3'-phosphorothioate
  modified_base 2: mod_base = OTHER; note = 2'-O-methylguanosine-3'-phosphorothioate
  modified_base 3: mod_base = OTHER; note = 2'-O-methyluridine-3'-phosphate
  modified_base 4: mod_base = OTHER; note = 2'-O-methylcytidine-3'-phosphate
  modified_base 5: mod_base = OTHER; note = 2'-O-methyladenosine-3'-phosphate
  modified_base 6: mod_base = OTHER; note = 2'-O-methyluridine-3'-phosphate
  modified_base 7: mod_base = OTHER; note = 2'-fluoroadenosine-3'-phosphate
  modified_base 8: mod_base = OTHER; note = 2'-O-methyluridine-3'-phosphate
  modified_base 9: mod_base = OTHER; note = 2'-fluorocytidine-3'-phosphate
  modified_base 10: mod_base = OTHER; note = 2'-fluoroadenosine-3'-phosphate
  modified_base 11: mod_base = OTHER; note = 2'-fluorouridine-3'-phosphate
  modified_base 12: mod_base = OTHER; note = 2'-O-methyluridine-3'-phosphate
  modified_base 13: mod_base = OTHER; note = 2'-O-methyluridine-3'-phosphate
  modified_base 14: mod_base = OTHER; note = 2'-O-methylcytidine-3'-phosphate
  modified_base 15: mod_base = OTHER; note = 2'-O-methyladenosine-3'-phosphate
  modified_base 16: mod_base = OTHER; note = 2'-O-methylcytidine-3'-phosphate
  modified_base 17: mod_base = OTHER; note = 2'-O-methyluridine-3'-phosphate
  modified_base 18: mod_base = OTHER; note = 2'-O-methylguanosine-3'-phosphate
  modified_base 19: mod_base = OTHER; note = 2'-O-methyluridine-3'-phosphate
  modified_base 20: mod_base = OTHER; note = 2'-O-methylcytidine-3'-phosphate
  modified_base 21: mod_base = OTHER; note = 2'-O-methyluridine-3'-phosphate N-[tris(GalNAc-alkyl)-amidodecanoyl)]-4-hydroxyprolinol Hyp-(GalNAc-alkyl)3
tgtcatatcatttcactgtct

SEQ ID NO: 3656 - RNA, 21 nt, synthetic construct
  source 1..21: mol_type = other RNA; note = Description of Artificial Sequence: Synthetic oligonucleotide
  modified_base 1: mod_base = OTHER; note = 2'-O-methyluridine-3'-phosphorothioate
  modified_base 2: mod_base = OTHER; note = 2'-O-methylcytidine-3'-phosphorothioate
  modified_base 3: mod_base = OTHER; note = 2'-O-methyladenosine-3'-phosphate
  modified_base 4: mod_base = OTHER; note = 2'-O-methyluridine-3'-phosphate
  modified_base 5: mod_base = OTHER; note = 2'-O-methyladenosine-3'-phosphate
  modified_base 6: mod_base = OTHER; note = 2'-O-methyluridine-3'-phosphate
  modified_base 7: mod_base = OTHER; note = 2'-fluorocytidine-3'-phosphate
  modified_base 8: mod_base = OTHER; note = 2'-O-methyladenosine-3'-phosphate
  modified_base 9: mod_base = OTHER; note = 2'-fluorouridine-3'-phosphate
  modified_base 10: mod_base = OTHER; note = 2'-fluorouridine-3'-phosphate
  modified_base 11: mod_base = OTHER; note = 2'-fluorouridine-3'-phosphate
  modified_base 12: mod_base = OTHER; note = 2'-O-methylcytidine-3'-phosphate
  modified_base 13: mod_base = OTHER; note = 2'-O-methyladenosine-3'-phosphate
  modified_base 14: mod_base = OTHER; note = 2'-O-methylcytidine-3'-phosphate
  modified_base 15: mod_base = OTHER; note = 2'-O-methyluridine-3'-phosphate
  modified_base 16: mod_base = OTHER; note = 2'-O-methylguanosine-3'-phosphate
  modified_base 17: mod_base = OTHER; note = 2'-O-methyluridine-3'-phosphate
  modified_base 18: mod_base = OTHER; note = 2'-O-methylcytidine-3'-phosphate
  modified_base 19: mod_base = OTHER; note = 2'-O-methyluridine-3'-phosphate
  modified_base 20: mod_base = OTHER; note = 2'-O-methyladenosine-3'-phosphate
  modified_base 21: mod_base = OTHER; note = 2'-O-methyladenosine-3'-phosphate N-[tris(GalNAc-alkyl)-amidodecanoyl)]-4-hydroxyprolinol Hyp-(GalNAc-alkyl)3
tcatatcatttcactgtctaa

SEQ ID NO: 3657 - RNA, 21 nt, synthetic construct
  source 1..21: mol_type = other RNA; note = Description of Artificial Sequence: Synthetic oligonucleotide
  modified_base 1: mod_base = OTHER; note = 2'-O-methyladenosine-3'-phosphorothioate
  modified_base 2: mod_base = OTHER; note = 2'-O-methyluridine-3'-phosphorothioate
  modified_base 3: mod_base = OTHER; note = 2'-O-methyluridine-3'-phosphate
  modified_base 4: mod_base = OTHER; note = 2'-O-methyluridine-3'-phosphate
  modified_base 5: mod_base = OTHER; note = 2'-O-methyladenosine-3'-phosphate
  modified_base 6: mod_base = OTHER; note = 2'-O-methyluridine-3'-phosphate
  modified_base 7: mod_base = OTHER; note = 2'-fluoroadenosine-3'-phosphate
  modified_base 8: mod_base = OTHER; note = 2'-O-methyladenosine-3'-phosphate
  modified_base 9: mod_base = OTHER; note = 2'-fluorouridine-3'-phosphate
  modified_base 10: mod_base = OTHER; note = 2'-fluorocytidine-3'-phosphate
  modified_base 11: mod_base = OTHER; note = 2'-fluorouridine-3'-phosphate
  modified_base 12: mod_base = OTHER; note = 2'-O-methyluridine-3'-phosphate
  modified_base 13: mod_base = OTHER; note = 2'-O-methylcytidine-3'-phosphate
  modified_base 14: mod_base = OTHER; note = 2'-O-methyluridine-3'-phosphate
  modified_base 15: mod_base = OTHER; note = 2'-O-methyladenosine-3'-phosphate
  modified_base 16: mod_base = OTHER; note = 2'-O-methyladenosine-3'-phosphate
  modified_base 17: mod_base = OTHER; note = 2'-O-methyladenosine-3'-phosphate
  modified_base 18: mod_base = OTHER; note = 2'-O-methylguanosine-3'-phosphate
  modified_base 19: mod_base = OTHER; note = 2'-O-methylguanosine-3'-phosphate
  modified_base 20: mod_base = OTHER; note = 2'-O-methyladenosine-3'-phosphate
  modified_base 21: mod_base = OTHER; note = 2'-O-methyladenosine-3'-phosphate N-[tris(GalNAc-alkyl)-amidodecanoyl)]-4-hydroxyprolinol Hyp-(GalNAc-alkyl)3
atttataatcttctaaaggaa

SEQ ID NO: 3658 - RNA, 21 nt, synthetic construct
  source 1..21: mol_type = other RNA; note = Description of Artificial Sequence: Synthetic oligonucleotide
  modified_base 1: mod_base = OTHER; note = 2'-O-methyluridine-3'-phosphorothioate
  modified_base 2: mod_base = OTHER; note = 2'-O-methylguanosine-3'-phosphorothioate
  modified_base 3: mod_base = OTHER; note = 2'-O-methylguanosine-3'-phosphate
  modified_base 4: mod_base = OTHER; note = 2'-O-methyluridine-3'-phosphate
  modified_base 5: mod_base = OTHER; note = 2'-O-methyluridine-3'-phosphate
  modified_base 6: mod_base = OTHER; note = 2'-O-methyluridine-3'-phosphate
  modified_base 7: mod_base = OTHER; note = 2'-fluoroguanosine-3'-phosphate
  modified_base 8: mod_base = OTHER; note = 2'-O-methyluridine-3'-phosphate
  modified_base 9: mod_base = OTHER; note = 2'-fluoroadenosine-3'-phosphate
  modified_base 10: mod_base = OTHER; note = 2'-fluoroadenosine-3'-phosphate
  modified_base 11: mod_base = OTHER; note = 2'-fluoroadenosine-3'-phosphate
  modified_base 12: mod_base = OTHER; note = 2'-O-methyladenosine-3'-phosphate
  modified_base 13: mod_base = OTHER; note = 2'-O-methyluridine-3'-phosphate
  modified_base 14: mod_base = OTHER; note = 2'-O-methylcytidine-3'-phosphate
  modified_base 15: mod_base = OTHER; note = 2'-O-methylcytidine-3'-phosphate
  modified_base 16: mod_base = OTHER; note = 2'-O-methyladenosine-3'-phosphate
  modified_base 17: mod_base = OTHER; note = 2'-O-methylcytidine-3'-phosphate
  modified_base 18: mod_base = OTHER; note = 2'-O-methyladenosine-3'-phosphate
  modified_base 19: mod_base = OTHER; note = 2'-O-methylguanosine-3'-phosphate
  modified_base 20: mod_base = OTHER; note = 2'-O-methylcytidine-3'-phosphate
  modified_base 21: mod_base = OTHER; note = 2'-O-methyluridine-3'-phosphate N-[tris(GalNAc-alkyl)-amidodecanoyl)]-4-hydroxyprolinol Hyp-(GalNAc-alkyl)3
tggtttgtaaaatccacagct

SEQ ID NO: 3659 - RNA, 21 nt, synthetic construct
  source 1..21: mol_type = other RNA; note = Description of Artificial Sequence: Synthetic oligonucleotide
  modified_base 1: mod_base = OTHER; note = 2'-O-methyladenosine-3'-phosphorothioate
  modified_base 2: mod_base = OTHER; note = 2'-O-methyluridine-3'-phosphorothioate
  modified_base 3: mod_base = OTHER; note = 2'-O-methylguanosine-3'-phosphate
  modified_base 4: mod_base = OTHER; note = 2'-O-methylcytidine-3'-phosphate
  modified_base 5: mod_base = OTHER; note = 2'-O-methyluridine-3'-phosphate
  modified_base 6: mod_base = OTHER; note = 2'-O-methylguanosine-3'-phosphate
  modified_base 7: mod_base = OTHER; note = 2'-fluoroguanosine-3'-phosphate
  modified_base 8: mod_base = OTHER; note = 2'-O-methyladenosine-3'-phosphate
  modified_base 9: mod_base = OTHER; note = 2'-fluorouridine-3'-phosphate
  modified_base 10: mod_base = OTHER; note = 2'-fluoroguanosine-3'-phosphate
  modified_base 11: mod_base = OTHER; note = 2'-fluoroguanosine-3'-phosphate
  modified_base 12: mod_base = OTHER; note = 2'-O-methyluridine-3'-phosphate
  modified_base 13: mod_base = OTHER; note = 2'-O-methyladenosine-3'-phosphate
  modified_base 14: mod_base = OTHER; note = 2'-O-methyluridine-3'-phosphate
  modified_base 15: mod_base = OTHER; note = 2'-O-methyluridine-3'-phosphate
  modified_base 16: mod_base = OTHER; note = 2'-O-methyladenosine-3'-phosphate
  modified_base 17: mod_base = OTHER; note = 2'-O-methyladenosine-3'-phosphate
  modified_base 18: mod_base = OTHER; note = 2'-O-methyluridine-3'-phosphate
  modified_base 19: mod_base = OTHER; note = 2'-O-methylcytidine-3'-phosphate
  modified_base 20: mod_base = OTHER; note = 2'-O-methyluridine-3'-phosphate
  modified_base 21: mod_base = OTHER; note = 2'-O-methyluridine-3'-phosphate N-[tris(GalNAc-alkyl)-amidodecanoyl)]-4-hydroxyprolinol Hyp-(GalNAc-alkyl)3
atgctggatggtattaatctt

SEQ ID NO: 3660 - RNA, 21 nt, synthetic construct
  source 1..21: mol_type = other RNA; note = Description of Artificial Sequence: Synthetic oligonucleotide
  modified_base 1: mod_base = OTHER; note = 2'-O-methyladenosine-3'-phosphorothioate
  modified_base 2: mod_base = OTHER; note = 2'-O-methyladenosine-3'-phosphorothioate
  modified_base 3: mod_base = OTHER; note = 2'-O-methylcytidine-3'-phosphate
  modified_base 4: mod_base = OTHER; note = 2'-O-methyluridine-3'-phosphate
  modified_base 5: mod_base = OTHER; note = 2'-O-methyladenosine-3'-phosphate
  modified_base 6: mod_base = OTHER; note = 2'-O-methyluridine-3'-phosphate
  modified_base 7: mod_base = OTHER; note = 2'-fluoroadenosine-3'-phosphate
  modified_base 8: mod_base = OTHER; note = 2'-O-methyluridine-3'-phosphate
  modified_base 9: mod_base = OTHER; note = 2'-fluorocytidine-3'-phosphate
  modified_base 10: mod_base = OTHER; note = 2'-fluoroadenosine-3'-phosphate
  modified_base 11: mod_base = OTHER; note = 2'-fluoroguanosine-3'-phosphate
  modified_base 12: mod_base = OTHER; note = 2'-O-methyluridine-3'-phosphate
  modified_base 13: mod_base = OTHER; note = 2'-O-methyladenosine-3'-phosphate
  modified_base 14: mod_base = OTHER; note = 2'-O-methylguanosine-3'-phosphate
  modified_base 15: mod_base = OTHER; note = 2'-O-methyluridine-3'-phosphate
  modified_base 16: mod_base = OTHER; note = 2'-O-methylguanosine-3'-phosphate
  modified_base 17: mod_base = OTHER; note = 2'-O-methyluridine-3'-phosphate
  modified_base 18: mod_base = OTHER; note = 2'-O-methyladenosine-3'-phosphate
  modified_base 19: mod_base = OTHER; note = 2'-O-methylcytidine-3'-phosphate
  modified_base 20: mod_base = OTHER; note = 2'-O-methyladenosine-3'-phosphate
  modified_base 21: mod_base = OTHER; note = 2'-O-methyluridine-3'-phosphate N-[tris(GalNAc-alkyl)-amidodecanoyl)]-4-hydroxyprolinol Hyp-(GalNAc-alkyl)3
aactatatcagtagtgtacat

SEQ ID NO: 3661 - RNA, 21 nt, synthetic construct
  source 1..21: mol_type = other RNA; note = Description of Artificial Sequence: Synthetic oligonucleotide
  modified_base 1: mod_base = OTHER; note = 2'-O-methyladenosine-3'-phosphorothioate
  modified_base 2: mod_base = OTHER; note = 2'-O-methyluridine-3'-phosphorothioate
  modified_base 3: mod_base = OTHER; note = 2'-O-methylcytidine-3'-phosphate
  modified_base 4: mod_base = OTHER; note = 2'-O-methyladenosine-3'-phosphate
  modified_base 5: mod_base = OTHER; note = 2'-O-methyladenosine-3'-phosphate
  modified_base 6: mod_base = OTHER; note = 2'-O-methylcytidine-3'-phosphate
  modified_base 7: mod_base = OTHER; note = 2'-fluorouridine-3'-phosphate
  modified_base 8: mod_base = OTHER; note = 2'-O-methylcytidine-3'-phosphate
  modified_base 9: mod_base = OTHER; note = 2'-fluorocytidine-3'-phosphate
  modified_base 10: mod_base = OTHER; note = 2'-fluorouridine-3'-phosphate
  modified_base 11: mod_base = OTHER; note = 2'-fluoroguanosine-3'-phosphate
  modified_base 12: mod_base = OTHER; note = 2'-O-methyladenosine-3'-phosphate
  modified_base 13: mod_base = OTHER; note = 2'-O-methyladenosine-3'-phosphate
  modified_base 14: mod_base = OTHER; note = 2'-O-methylguanosine-3'-phosphate
  modified_base 15: mod_base = OTHER; note = 2'-O-methyluridine-3'-phosphate
  modified_base 16: mod_base = OTHER; note = 2'-O-methyluridine-3'-phosphate
  modified_base 17: mod_base = OTHER; note = 2'-O-methyladenosine-3'-phosphate
  modified_base 18: mod_base = OTHER; note = 2'-O-methylguanosine-3'-phosphate
  modified_base 19: mod_base = OTHER; note = 2'-O-methyladenosine-3'-phosphate
  modified_base 20: mod_base = OTHER; note = 2'-O-methyladenosine-3'-phosphate
  modified_base 21: mod_base = OTHER; note = 2'-O-methyladenosine-3'-phosphate N-[tris(GalNAc-alkyl)-amidodecanoyl)]-4-hydroxyprolinol Hyp-(GalNAc-alkyl)3
atcaactcctgaagttagaaa

SEQ ID NO: 3662 - RNA, 21 nt, synthetic construct
  source 1..21: mol_type = other RNA; note = Description of Artificial Sequence: Synthetic oligonucleotide
  modified_base 1: mod_base = OTHER; note = 2'-O-methylcytidine-3'-phosphorothioate
  modified_base 2: mod_base = OTHER; note = 2'-O-methyluridine-3'-phosphorothioate
  modified_base 3: mod_base = OTHER; note = 2'-O-methylguanosine-3'-phosphate
  modified_base 4: mod_base = OTHER; note = 2'-O-methylguanosine-3'-phosphate
  modified_base 5: mod_base = OTHER; note = 2'-O-methyladenosine-3'-phosphate
  modified_base 6: mod_base = OTHER; note = 2'-O-methyluridine-3'-phosphate
  modified_base 7: mod_base = OTHER; note = 2'-fluoroguanosine-3'-phosphate
  modified_base 8: mod_base = OTHER; note = 2'-O-methylguanosine-3'-phosphate
  modified_base 9: mod_base = OTHER; note = 2'-fluorouridine-3'-phosphate
  modified_base 10: mod_base = OTHER; note = 2'-fluoroadenosine-3'-phosphate
  modified_base 11: mod_base = OTHER; note = 2'-fluorouridine-3'-phosphate
  modified_base 12: mod_base = OTHER; note = 2'-O-methyluridine-3'-phosphate
  modified_base 13: mod_base = OTHER; note = 2'-O-methyladenosine-3'-phosphate
  modified_base 14: mod_base = OTHER; note = 2'-O-methyladenosine-3'-phosphate
  modified_base 15: mod_base = OTHER; note = 2'-O-methyluridine-3'-phosphate
  modified_base 16: mod_base = OTHER; note = 2'-O-methylcytidine-3'-phosphate
  modified_base 17: mod_base = OTHER; note = 2'-O-methyluridine-3'-phosphate
  modified_base 18: mod_base = OTHER; note = 2'-O-methyluridine-3'-phosphate
  modified_base 19: mod_base = OTHER; note = 2'-O-methylguanosine-3'-phosphate
  modified_base 20: mod_base = OTHER; note = 2'-O-methyluridine-3'-phosphate
  modified_base 21: mod_base = OTHER; note = 2'-O-methyladenosine-3'-phosphate N-[tris(GalNAc-alkyl)-amidodecanoyl)]-4-hydroxyprolinol Hyp-(GalNAc-alkyl)3
ctggatggtattaatcttgta

SEQ ID NO: 3663 - RNA, 21 nt, synthetic construct
  source 1..21: mol_type = other RNA; note = Description of Artificial Sequence: Synthetic oligonucleotide
  modified_base 1: mod_base = OTHER; note = 2'-O-methyluridine-3'-phosphorothioate
  modified_base 2: mod_base = OTHER; note = 2'-O-methyladenosine-3'-phosphorothioate
  modified_base 3: mod_base = OTHER; note = 2'-O-methyluridine-3'-phosphate
  modified_base 4: mod_base = OTHER; note = 2'-O-methylcytidine-3'-phosphate
  modified_base 5: mod_base = OTHER; note = 2'-O-methyladenosine-3'-phosphate
  modified_base 6: mod_base = OTHER; note = 2'-O-methyluridine-3'-phosphate
  modified_base 7: mod_base = OTHER; note = 2'-fluorouridine-3'-phosphate
  modified_base 8: mod_base = OTHER; note = 2'-O-methyluridine-3'-phosphate
  modified_base 9: mod_base = OTHER; note = 2'-fluorocytidine-3'-phosphate
  modified_base 10: mod_base = OTHER; note = 2'-fluoroadenosine-3'-phosphate
  modified_base 11: mod_base = OTHER; note = 2'-fluorocytidine-3'-phosphate
  modified_base 12: mod_base = OTHER; note = 2'-O-methyluridine-3'-phosphate
  modified_base 13: mod_base = OTHER; note = 2'-O-methylguanosine-3'-phosphate
  modified_base 14: mod_base = OTHER; note = 2'-O-methyluridine-3'-phosphate
  modified_base 15: mod_base = OTHER; note = 2'-O-methylcytidine-3'-phosphate
  modified_base 16: mod_base = OTHER; note = 2'-O-methyluridine-3'-phosphate
  modified_base 17: mod_base = OTHER; note = 2'-O-methyladenosine-3'-phosphate
  modified_base 18: mod_base = OTHER; note = 2'-O-methylguanosine-3'-phosphate
  modified_base 19: mod_base = OTHER; note = 2'-O-methylguanosine-3'-phosphate
  modified_base 20: mod_base = OTHER; note = 2'-O-methylcytidine-3'-phosphate
  modified_base 21: mod_base = OTHER; note = 2'-O-methyluridine-3'-phosphate N-[tris(GalNAc-alkyl)-amidodecanoyl)]-4-hydroxyprolinol Hyp-(GalNAc-alkyl)3
tatcatttcactgtctaggct

SEQ ID NO: 3664 - RNA, 21 nt, synthetic construct
  source 1..21: mol_type = other RNA; note = Description of Artificial Sequence: Synthetic oligonucleotide
  modified_base 1: mod_base = OTHER; note = 2'-O-methylguanosine-3'-phosphorothioate
  modified_base 2: mod_base = OTHER; note = 2'-O-methyluridine-3'-phosphorothioate
  modified_base 3: mod_base = OTHER; note = 2'-O-methyladenosine-3'-phosphate
  modified_base 4: mod_base = OTHER; note = 2'-O-methyladenosine-3'-phosphate
  modified_base 5: mod_base = OTHER; note = 2'-O-methyladenosine-3'-phosphate
  modified_base 6: mod_base = OTHER; note = 2'-O-methyladenosine-3'-phosphate
  modified_base 7: mod_base = OTHER; note = 2'-fluorouridine-3'-phosphate
  modified_base 8: mod_base = OTHER; note = 2'-O-methylcytidine-3'-phosphate
  modified_base 9: mod_base = OTHER; note = 2'-fluorocytidine-3'-phosphate
  modified_base 10: mod_base = OTHER; note = 2'-fluoroadenosine-3'-phosphate
  modified_base 11: mod_base = OTHER; note = 2'-fluorocytidine-3'-phosphate
  modified_base 12: mod_base = OTHER; note = 2'-O-methyladenosine-3'-phosphate
  modified_base 13: mod_base = OTHER; note = 2'-O-methylguanosine-3'-phosphate
  modified_base 14: mod_base = OTHER; note = 2'-O-methylcytidine-3'-phosphate
  modified_base 15: mod_base = OTHER; note = 2'-O-methyluridine-3'-phosphate
  modified_base 16: mod_base = OTHER; note = 2'-O-methyladenosine-3'-phosphate
  modified_base 17: mod_base = OTHER; note = 2'-O-methyluridine-3'-phosphate
  modified_base 18: mod_base = OTHER; note = 2'-O-methyladenosine-3'-phosphate
  modified_base 19: mod_base = OTHER; note = 2'-O-methyluridine-3'-phosphate
  modified_base 20: mod_base = OTHER; note = 2'-O-methylcytidine-3'-phosphate
  modified_base 21: mod_base = OTHER; note = 2'-O-methyladenosine-3'-phosphate N-[tris(GalNAc-alkyl)-amidodecanoyl)]-4-hydroxyprolinol Hyp-(GalNAc-alkyl)3
gtaaaatccacagctatatca

SEQ ID NO: 3665 - RNA, 21 nt, synthetic construct
  source 1..21: mol_type = other RNA; note = Description of Artificial Sequence: Synthetic oligonucleotide
  modified_base 1: mod_base = OTHER; note = 2'-O-methyluridine-3'-phosphorothioate
  modified_base 2: mod_base = OTHER; note = 2'-O-methylcytidine-3'-phosphorothioate
  modified_base 3: mod_base = OTHER; note = 2'-O-methylcytidine-3'-phosphate
  modified_base 4: mod_base = OTHER; note = 2'-O-methyluridine-3'-phosphate
  modified_base 5: mod_base = OTHER; note = 2'-O-methyluridine-3'-phosphate
  modified_base 6: mod_base = OTHER; note = 2'-O-methyladenosine-3'-phosphate
  modified_base 7: mod_base = OTHER; note = 2'-fluoroguanosine-3'-phosphate
  modified_base 8: mod_base = OTHER; note = 2'-O-methyluridine-3'-phosphate
  modified_base 9: mod_base = OTHER; note = 2'-fluoroguanosine-3'-phosphate
  modified_base 10: mod_base = OTHER; note = 2'-fluorouridine-3'-phosphate
  modified_base 11: mod_base = OTHER; note = 2'-fluorouridine-3'-phosphate
  modified_base 12: mod_base = OTHER; note = 2'-O-methylcytidine-3'-phosphate
  modified_base 13: mod_base = OTHER; note = 2'-O-methylcytidine-3'-phosphate
  modified_base 14: mod_base = OTHER; note = 2'-O-methyluridine-3'-phosphate
  modified_base 15: mod_base = OTHER; note = 2'-O-methyluridine-3'-phosphate
  modified_base 16: mod_base = OTHER; note = 2'-O-methylguanosine-3'-phosphate
  modified_base 17: mod_base = OTHER; note = 2'-O-methylcytidine-3'-phosphate
  modified_base 18: mod_base = OTHER; note = 2'-O-methyladenosine-3'-phosphate
  modified_base 19: mod_base = OTHER; note = 2'-O-methyluridine-3'-phosphate
  modified_base 20: mod_base = OTHER; note = 2'-O-methyluridine-3'-phosphate
  modified_base 21: mod_base = OTHER; note = 2'-O-methyluridine-3'-phosphate N-[tris(GalNAc-alkyl)-amidodecanoyl)]-4-hydroxyprolinol Hyp-(GalNAc-alkyl)3
tccttagtgttccttgcattt

SEQ ID NO: 3666 - RNA, 21 nt, synthetic construct
  source 1..21: mol_type = other RNA; note = Description of Artificial Sequence: Synthetic oligonucleotide
  modified_base 1: mod_base = OTHER; note = 2'-O-methylcytidine-3'-phosphorothioate
  modified_base 2: mod_base = OTHER; note = 2'-O-methyladenosine-3'-phosphorothioate
  modified_base 3: mod_base = OTHER; note = 2'-O-methyluridine-3'-phosphate
  modified_base 4: mod_base = OTHER; note = 2'-O-methyladenosine-3'-phosphate
  modified_base 5: mod_base = OTHER; note = 2'-O-methyluridine-3'-phosphate
  modified_base 6: mod_base = OTHER; note = 2'-O-methylcytidine-3'-phosphate
  modified_base 7: mod_base = OTHER; note = 2'-fluoroadenosine-3'-phosphate
  modified_base 8: mod_base = OTHER; note = 2'-O-methyluridine-3'-phosphate
  modified_base 9: mod_base = OTHER; note = 2'-fluorouridine-3'-phosphate
  modified_base 10: mod_base = OTHER; note = 2'-fluorouridine-3'-phosphate
  modified_base 11: mod_base = OTHER; note = 2'-fluorocytidine-3'-phosphate
  modified_base 12: mod_base = OTHER; note = 2'-O-methyladenosine-3'-phosphate
  modified_base 13: mod_base = OTHER; note = 2'-O-methylcytidine-3'-phosphate
  modified_base 14: mod_base = OTHER; note = 2'-O-methyluridine-3'-phosphate
  modified_base 15: mod_base = OTHER; note = 2'-O-methylguanosine-3'-phosphate
  modified_base 16: mod_base = OTHER; note = 2'-O-methyluridine-3'-phosphate
  modified_base 17: mod_base = OTHER; note = 2'-O-methylcytidine-3'-phosphate
  modified_base 18: mod_base = OTHER; note = 2'-O-methyluridine-3'-phosphate
  modified_base 19: mod_base = OTHER; note = 2'-O-methyladenosine-3'-phosphate
  modified_base 20: mod_base = OTHER; note = 2'-O-methylguanosine-3'-phosphate
  modified_base 21: mod_base = OTHER; note = 2'-O-methyladenosine-3'-phosphate N-[tris(GalNAc-alkyl)-amidodecanoyl)]-4-hydroxyprolinol Hyp-(GalNAc-alkyl)3
catatcatttcactgtctaga

SEQ ID NO: 3667 - RNA, 21 nt, synthetic construct
  source 1..21: mol_type = other RNA; note = Description of Artificial Sequence: Synthetic oligonucleotide
  modified_base 1: mod_base = OTHER; note = 2'-O-methyladenosine-3'-phosphorothioate
  modified_base 2: mod_base = OTHER; note = 2'-O-methyladenosine-3'-phosphorothioate
  modified_base 3: mod_base = OTHER; note = 2'-O-methylcytidine-3'-phosphate
  modified_base 4: mod_base = OTHER; note = 2'-O-methyladenosine-3'-phosphate
  modified_base 5: mod_base = OTHER; note = 2'-O-methyluridine-3'-phosphate
  modified_base 6: mod_base = OTHER; note = 2'-O-methylcytidine-3'-phosphate
  modified_base 7: mod_base = OTHER; note = 2'-fluoroadenosine-3'-phosphate
  modified_base 8: mod_base = OTHER; note = 2'-O-methyladenosine-3'-phosphate
  modified_base 9: mod_base = OTHER; note = 2'-fluorocytidine-3'-phosphate
  modified_base 10: mod_base = OTHER; note = 2'-fluorouridine-3'-phosphate
  modified_base 11: mod_base = OTHER; note = 2'-fluorocytidine-3'-phosphate
  modified_base 12: mod_base = OTHER; note = 2'-O-methylcytidine-3'-phosphate
  modified_base 13: mod_base = OTHER; note = 2'-O-methyluridine-3'-phosphate
  modified_base 14: mod_base = OTHER; note = 2'-O-methylguanosine-3'-phosphate
  modified_base 15: mod_base = OTHER; note = 2'-O-methyladenosine-3'-phosphate
  modified_base 16: mod_base = OTHER; note = 2'-O-methyladenosine-3'-phosphate
  modified_base 17: mod_base = OTHER; note = 2'-O-methylguanosine-3'-phosphate
  modified_base 18: mod_base = OTHER; note = 2'-O-methyluridine-3'-phosphate
  modified_base 19: mod_base = OTHER; note = 2'-O-methyluridine-3'-phosphate
  modified_base 20: mod_base = OTHER; note = 2'-O-methyladenosine-3'-phosphate
  modified_base 21: mod_base = OTHER; note = 2'-O-methyladenosine-3'-phosphate N-[tris(GalNAc-alkyl)-amidodecanoyl)]-4-hydroxyprolinol Hyp-(GalNAc-alkyl)3
aacatcaactcctgaagttaa

SEQ ID NO: 3668 - RNA, 21 nt, synthetic construct
  source 1..21: mol_type = other RNA; note = Description of Artificial Sequence: Synthetic oligonucleotide
  modified_base 1: mod_base = OTHER; note = 2'-O-methylcytidine-3'-phosphorothioate
  modified_base 2: mod_base = OTHER; note = 2'-O-methylcytidine-3'-phosphorothioate
  modified_base 3: mod_base = OTHER; note = 2'-O-methyluridine-3'-phosphate
  modified_base 4: mod_base = OTHER; note = 2'-O-methylguanosine-3'-phosphate
  modified_base 5: mod_base = OTHER; note = 2'-O-methyladenosine-3'-phosphate
  modified_base 6: mod_base = OTHER; note = 2'-O-methyluridine-3'-phosphate
  modified_base 7: mod_base = OTHER; note = 2'-fluoroguanosine-3'-phosphate
  modified_base 8: mod_base = OTHER; note = 2'-O-methylcytidine-3'-phosphate
  modified_base 9: mod_base = OTHER; note = 2'-fluorouridine-3'-phosphate
  modified_base 10: mod_base = OTHER; note = 2'-fluoroguanosine-3'-phosphate
  modified_base 11: mod_base = OTHER; note = 2'-fluoroguanosine-3'-phosphate
  modified_base 12: mod_base = OTHER; note = 2'-O-methyladenosine-3'-phosphate
  modified_base 13: mod_base = OTHER; note = 2'-O-methyluridine-3'-phosphate
  modified_base 14: mod_base = OTHER; note = 2'-O-methylguanosine-3'-phosphate
  modified_base 15: mod_base = OTHER; note = 2'-O-methylguanosine-3'-phosphate
  modified_base 16: mod_base = OTHER; note = 2'-O-methyluridine-3'-phosphate
  modified_base 17: mod_base = OTHER; note = 2'-O-methyladenosine-3'-phosphate
  modified_base 18: mod_base = OTHER; note = 2'-O-methyluridine-3'-phosphate
  modified_base 19: mod_base = OTHER; note = 2'-O-methyluridine-3'-phosphate
  modified_base 20: mod_base = OTHER; note = 2'-O-methyladenosine-3'-phosphate
  modified_base 21: mod_base = OTHER; note = 2'-O-methyladenosine-3'-phosphate N-[tris(GalNAc-alkyl)-amidodecanoyl)]-4-hydroxyprolinol Hyp-(GalNAc-alkyl)3
cctgatgctggatggtattaa

SEQ ID NO: 3669 - RNA, 21 nt, synthetic construct
  source 1..21: mol_type = other RNA; note = Description of Artificial Sequence: Synthetic oligonucleotide
  modified_base 1: mod_base = OTHER; note = 2'-O-methyladenosine-3'-phosphorothioate
  modified_base 2: mod_base = OTHER; note = 2'-O-methyladenosine-3'-phosphorothioate
  modified_base 3: mod_base = OTHER; note = 2'-O-methyluridine-3'-phosphate
  modified_base 4: mod_base = OTHER; note = 2'-O-methylguanosine-3'-phosphate
  modified_base 5: mod_base = OTHER; note = 2'-O-methylcytidine-3'-phosphate
  modified_base 6: mod_base = OTHER; note = 2'-O-methyladenosine-3'-phosphate
  modified_base 7: mod_base = OTHER; note = 2'-fluoroadenosine-3'-phosphate
  modified_base 8: mod_base = OTHER; note = 2'-O-methylcytidine-3'-phosphate
  modified_base 9: mod_base = OTHER; note = 2'-fluorocytidine-3'-phosphate
  modified_base 10: mod_base = OTHER; note = 2'-fluoroadenosine-3'-phosphate
  modified_base 11: mod_base = OTHER; note = 2'-fluoroadenosine-3'-phosphate
  modified_base 12: mod_base = OTHER; note = 2'-O-methylcytidine-3'-phosphate
  modified_base 13: mod_base = OTHER; note = 2'-O-methyluridine-3'-phosphate
  modified_base 14: mod_base = OTHER; note = 2'-O-methyladenosine-3'-phosphate
  modified_base 15: mod_base = OTHER; note = 2'-O-methyluridine-3'-phosphate
  modified_base 16: mod_base = OTHER; note = 2'-O-methylcytidine-3'-phosphate
  modified_base 17: mod_base = OTHER; note = 2'-O-methylcytidine-3'-phosphate
  modified_base 18: mod_base = OTHER; note = 2'-O-methyladenosine-3'-phosphate
  modified_base 19: mod_base = OTHER; note = 2'-O-methyladenosine-3'-phosphate
  modified_base 20: mod_base = OTHER; note = 2'-O-methylguanosine-3'-phosphate
  modified_base 21: mod_base = OTHER; note = 2'-O-methyluridine-3'-phosphate N-[tris(GalNAc-alkyl)-amidodecanoyl)]-4-hydroxyprolinol Hyp-(GalNAc-alkyl)3
aatgcaaccaactatccaagt

SEQ ID NO: 3670 - RNA, 21 nt, synthetic construct
  source 1..21: mol_type = other RNA; note = Description of Artificial Sequence: Synthetic oligonucleotide
  modified_base 1: mod_base = OTHER; note = 2'-O-methyluridine-3'-phosphorothioate
  modified_base 2: mod_base = OTHER; note = 2'-O-methyluridine-3'-phosphorothioate
  modified_base 3: mod_base = OTHER; note = 2'-O-methyluridine-3'-phosphate
  modified_base 4: mod_base = OTHER; note = 2'-O-methyladenosine-3'-phosphate
  modified_base 5: mod_base = OTHER; note = 2'-O-methylcytidine-3'-phosphate
  modified_base 6: mod_base = OTHER; note = 2'-O-methylguanosine-3'-phosphate
  modified_base 7: mod_base = OTHER; note = 2'-fluoroguanosine-3'-phosphate
  modified_base 8: mod_base = OTHER; note = 2'-O-methyladenosine-3'-phosphate
  modified_base 9: mod_base = OTHER; note = 2'-fluoroadenosine-3'-phosphate
  modified_base 10: mod_base = OTHER; note = 2'-fluorouridine-3'-phosphate
  modified_base 11: mod_base = OTHER; note = 2'-fluoroadenosine-3'-phosphate
  modified_base 12: mod_base = OTHER; note = 2'-O-methyladenosine-3'-phosphate
  modified_base 13: mod_base = OTHER; note = 2'-O-methyladenosine-3'-phosphate
  modified_base 14: mod_base = OTHER; note = 2'-O-methylguanosine-3'-phosphate
  modified_base 15: mod_base = OTHER; note = 2'-O-methylguanosine-3'-phosphate
  modified_base 16: mod_base = OTHER; note = 2'-O-methyladenosine-3'-phosphate
  modified_base 17: mod_base = OTHER; note = 2'-O-methyluridine-3'-phosphate
  modified_base 18: mod_base = OTHER; note = 2'-O-methylguanosine-3'-phosphate
  modified_base 19: mod_base = OTHER; note = 2'-O-methyladenosine-3'-phosphate
  modified_base 20: mod_base = OTHER; note = 2'-O-methyluridine-3'-phosphate
  modified_base 21: mod_base = OTHER; note = 2'-O-methyladenosine-3'-phosphate N-[tris(GalNAc-alkyl)-amidodecanoyl)]-4-hydroxyprolinol Hyp-(GalNAc-alkyl)3
tttacggaataaaggatgata

SEQ ID NO: 3671 - RNA, 21 nt, synthetic construct
  source 1..21: mol_type = other RNA; note = Description of Artificial Sequence: Synthetic oligonucleotide
  modified_base 1: mod_base = OTHER; note = 2'-O-methyluridine-3'-phosphorothioate
  modified_base 2: mod_base = OTHER; note = 2'-O-methyluridine-3'-phosphorothioate
  modified_base 3: mod_base = OTHER; note = 2'-O-methylcytidine-3'-phosphate
  modified_base 4: mod_base = OTHER; note = 2'-O-methylcytidine-3'-phosphate
  modified_base 5: mod_base = OTHER; note = 2'-O-methyluridine-3'-phosphate
  modified_base 6: mod_base = OTHER; note = 2'-O-methyluridine-3'-phosphate
  modified_base 7: mod_base = OTHER; note = 2'-fluoroadenosine-3'-phosphate
  modified_base 8: mod_base = OTHER; note = 2'-O-methylguanosine-3'-phosphate
  modified_base 9: mod_base = OTHER; note = 2'-fluorouridine-3'-phosphate
  modified_base 10: mod_base = OTHER; note = 2'-fluoroguanosine-3'-phosphate
  modified_base 11: mod_base = OTHER; note = 2'-fluorouridine-3'-phosphate
  modified_base 12: mod_base = OTHER; note = 2'-O-methyluridine-3'-phosphate
  modified_base 13: mod_base = OTHER; note = 2'-O-methylcytidine-3'-phosphate
  modified_base 14: mod_base = OTHER; note = 2'-O-methylcytidine-3'-phosphate
  modified_base 15: mod_base = OTHER; note = 2'-O-methyluridine-3'-phosphate
  modified_base 16: mod_base = OTHER; note = 2'-O-methyluridine-3'-phosphate
  modified_base 17: mod_base = OTHER; note = 2'-O-methylguanosine-3'-phosphate
  modified_base 18: mod_base = OTHER; note = 2'-O-methylcytidine-3'-phosphate
  modified_base 19: mod_base = OTHER; note = 2'-O-methyladenosine-3'-phosphate
  modified_base 20: mod_base = OTHER; note = 2'-O-methyluridine-3'-phosphate
  modified_base 21: mod_base = OTHER; note = 2'-O-methyluridine-3'-phosphate N-[tris(GalNAc-alkyl)-amidodecanoyl)]-4-hydroxyprolinol Hyp-(GalNAc-alkyl)3
ttccttagtgttccttgcatt

SEQ ID NO: 3672 - RNA, 21 nt, synthetic construct
  source 1..21: mol_type = other RNA; note = Description of Artificial Sequence: Synthetic oligonucleotide
  modified_base 1: mod_base = OTHER; note = 2'-O-methylcytidine-3'-phosphorothioate
  modified_base 2: mod_base = OTHER; note = 2'-O-methyladenosine-3'-phosphorothioate
  modified_base 3: mod_base = OTHER; note = 2'-O-methyladenosine-3'-phosphate
  modified_base 4: mod_base = OTHER; note = 2'-O-methyluridine-3'-phosphate
  modified_base 5: mod_base = OTHER; note = 2'-O-methylguanosine-3'-phosphate
  modified_base 6: mod_base = OTHER; note = 2'-O-methylcytidine-3'-phosphate
  modified_base 7: mod_base = OTHER; note = 2'-fluoroadenosine-3'-phosphate
  modified_base 8: mod_base = OTHER; note = 2'-O-methyladenosine-3'-phosphate
  modified_base 9: mod_base = OTHER; note = 2'-fluorocytidine-3'-phosphate
  modified_base 10: mod_base = OTHER; note = 2'-fluorocytidine-3'-phosphate
  modified_base 11: mod_base = OTHER; note = 2'-fluoroadenosine-3'-phosphate
  modified_base 12: mod_base = OTHER; note = 2'-O-methyladenosine-3'-phosphate
  modified_base 13: mod_base = OTHER; note = 2'-O-methylcytidine-3'-phosphate
  modified_base 14: mod_base = OTHER; note = 2'-O-methyluridine-3'-phosphate
  modified_base 15: mod_base = OTHER; note = 2'-O-methyladenosine-3'-phosphate
  modified_base 16: mod_base = OTHER; note = 2'-O-methyluridine-3'-phosphate
  modified_base 17: mod_base = OTHER; note = 2'-O-methylcytidine-3'-phosphate
  modified_base 18: mod_base = OTHER; note = 2'-O-methylcytidine-3'-phosphate
  modified_base 19: mod_base = OTHER; note = 2'-O-methyladenosine-3'-phosphate
  modified_base 20: mod_base = OTHER; note = 2'-O-methyladenosine-3'-phosphate
  modified_base 21: mod_base = OTHER; note = 2'-O-methyladenosine-3'-phosphate N-[tris(GalNAc-alkyl)-amidodecanoyl)]-4-hydroxyprolinol Hyp-(GalNAc-alkyl)3
caatgcaaccaactatccaaa

SEQ ID NO: 3673 - RNA, 21 nt, synthetic construct
  source 1..21: mol_type = other RNA; note = Description of Artificial Sequence: Synthetic oligonucleotide
  modified_base 1: mod_base = OTHER; note = 2'-O-methyladenosine-3'-phosphorothioate
  modified_base 2: mod_base = OTHER; note = 2'-O-methylguanosine-3'-phosphorothioate
  modified_base 3: mod_base = OTHER; note = 2'-O-methyladenosine-3'-phosphate
  modified_base 4: mod_base = OTHER; note = 2'-O-methyluridine-3'-phosphate
  modified_base 5: mod_base = OTHER; note = 2'-O-methyluridine-3'-phosphate
  modified_base 6: mod_base = OTHER; note = 2'-O-methyluridine-3'-phosphate
  modified_base 7: mod_base = OTHER; note = 2'-fluoroguanosine-3'-phosphate
  modified_base 8: mod_base = OTHER; note = 2'-O-methylguanosine-3'-phosphate
  modified_base 9: mod_base = OTHER; note = 2'-fluorocytidine-3'-phosphate
  modified_base 10: mod_base = OTHER; note = 2'-fluoroadenosine-3'-phosphate
  modified_base 11: mod_base = OTHER; note = 2'-fluoroguanosine-3'-phosphate
  modified_base 12: mod_base = OTHER; note = 2'-O-methyladenosine-3'-phosphate
  modified_base 13: mod_base = OTHER; note = 2'-O-methylguanosine-3'-phosphate
  modified_base 14: mod_base = OTHER; note = 2'-O-methyladenosine-3'-phosphate
  modified_base 15: mod_base = OTHER; note = 2'-O-methylguanosine-3'-phosphate
  modified_base 16: mod_base = OTHER; note = 2'-O-methyluridine-3'-phosphate
  modified_base 17: mod_base = OTHER; note = 2'-O-methyladenosine-3'-phosphate
  modified_base 18: mod_base = OTHER; note = 2'-O-methyluridine-3'-phosphate
  modified_base 19: mod_base = OTHER; note = 2'-O-methyladenosine-3'-phosphate
  modified_base 20: mod_base = OTHER; note = 2'-O-methyladenosine-3'-phosphate
  modified_base 21: mod_base = OTHER; note = 2'-O-methyluridine-3'-phosphate N-[tris(GalNAc-alkyl)-amidodecanoyl)]-4-hydroxyprolinol Hyp-(GalNAc-alkyl)3
agatttggcagagagtataat

SEQ ID NO: 3674 - RNA, 21 nt, synthetic construct
  source 1..21: mol_type = other RNA; note = Description of Artificial Sequence: Synthetic oligonucleotide
  modified_base 1: mod_base = OTHER; note = 2'-O-methyluridine-3'-phosphorothioate
  modified_base 2: mod_base = OTHER; note = 2'-O-methyluridine-3'-phosphorothioate
  modified_base 3: mod_base = OTHER; note = 2'-O-methyluridine-3'-phosphate
  modified_base 4: mod_base = OTHER; note = 2'-O-methylcytidine-3'-phosphate
  modified_base 5: mod_base = OTHER; note = 2'-O-methylcytidine-3'-phosphate
  modified_base 6: mod_base = OTHER; note = 2'-O-methyladenosine-3'-phosphate
  modified_base 7: mod_base = OTHER; note = 2'-fluorocytidine-3'-phosphate
  modified_base 8: mod_base = OTHER; note = 2'-O-methylcytidine-3'-phosphate
  modified_base 9: mod_base = OTHER; note = 2'-fluoroadenosine-3'-phosphate
  modified_base 10: mod_base = OTHER; note = 2'-fluorouridine-3'-phosphate
  modified_base 11: mod_base = OTHER; note = 2'-fluoroguanosine-3'-phosphate
  modified_base 12: mod_base = OTHER; note = 2'-O-methyladenosine-3'-phosphate
  modified_base 13: mod_base = OTHER; note = 2'-O-methyluridine-3'-phosphate
  modified_base 14: mod_base = OTHER; note = 2'-O-methyluridine-3'-phosphate
  modified_base 15: mod_base = OTHER; note = 2'-O-methyladenosine-3'-phosphate
  modified_base 16: mod_base = OTHER; note = 2'-O-methyladenosine-3'-phosphate
  modified_base 17: mod_base = OTHER; note = 2'-O-methylguanosine-3'-phosphate
  modified_base 18: mod_base = OTHER; note = 2'-O-methylguanosine-3'-phosphate
  modified_base 19: mod_base = OTHER; note = 2'-O-methylguanosine-3'-phosphate
  modified_base 20: mod_base = OTHER; note = 2'-O-methyluridine-3'-phosphate
  modified_base 21: mod_base = OTHER; note = 2'-O-methyladenosine-3'-phosphate N-[tris(GalNAc-alkyl)-amidodecanoyl)]-4-hydroxyprolinol Hyp-(GalNAc-alkyl)3
tttccaccatgattaagggta

SEQ ID NO: 3675 - RNA, 21 nt, synthetic construct
  source 1..21: mol_type = other RNA; note = Description of Artificial Sequence: Synthetic oligonucleotide
  modified_base 1: mod_base = OTHER; note = 2'-O-methyladenosine-3'-phosphorothioate
  modified_base 2: mod_base = OTHER; note = 2'-O-methylcytidine-3'-phosphorothioate
  modified_base 3: mod_base = OTHER; note = 2'-O-methyluridine-3'-phosphate
  modified_base 4: mod_base = OTHER; note = 2'-O-methylguanosine-3'-phosphate
  modified_base 5: mod_base = OTHER; note = 2'-O-methylguanosine-3'-phosphate
  modified_base 6: mod_base = OTHER; note = 2'-O-methyluridine-3'-phosphate
  modified_base 7: mod_base = OTHER; note = 2'-fluorouridine-3'-phosphate
  modified_base 8: mod_base = OTHER; note = 2'-O-methyladenosine-3'-phosphate
  modified_base 9: mod_base = OTHER; note = 2'-fluoroguanosine-3'-phosphate
  modified_base 10: mod_base = OTHER; note = 2'-fluorouridine-3'-phosphate
  modified_base 11: mod_base = OTHER; note = 2'-fluoroguanosine-3'-phosphate
  modified_base 12: mod_base = OTHER; note = 2'-O-methyluridine-3'-phosphate
  modified_base 13: mod_base = OTHER; note = 2'-O-methylguanosine-3'-phosphate
  modified_base 14: mod_base = OTHER; note = 2'-O-methyladenosine-3'-phosphate
  modified_base 15: mod_base = OTHER; note = 2'-O-methyladenosine-3'-phosphate
  modified_base 16: mod_base = OTHER; note = 2'-O-methyladenosine-3'-phosphate
  modified_base 17: mod_base = OTHER; note = 2'-O-methyluridine-3'-phosphate
  modified_base 18: mod_base = OTHER; note = 2'-O-methyladenosine-3'-phosphate
  modified_base 19: mod_base = OTHER; note = 2'-O-methylguanosine-3'-phosphate
  modified_base 20: mod_base = OTHER; note = 2'-O-methyluridine-3'-phosphate
  modified_base 21: mod_base = OTHER; note = 2'-O-methyluridine-3'-phosphate N-[tris(GalNAc-alkyl)-amidodecanoyl)]-4-hydroxyprolinol Hyp-(GalNAc-alkyl)3
actggttagtgtgaaatagtt

SEQ ID NO: 3676 - RNA, 21 nt, synthetic construct
  source 1..21: mol_type = other RNA; note = Description of Artificial Sequence: Synthetic oligonucleotide
  modified_base 1: mod_base = OTHER; note = 2'-O-methylcytidine-3'-phosphorothioate
  modified_base 2: mod_base = OTHER; note = 2'-O-methyladenosine-3'-phosphorothioate
  modified_base 3: mod_base = OTHER; note = 2'-O-methyladenosine-3'-phosphate
  modified_base 4: mod_base = OTHER; note = 2'-O-methylguanosine-3'-phosphate
  modified_base 5: mod_base = OTHER; note = 2'-O-methyluridine-3'-phosphate
  modified_base 6: mod_base = OTHER; note = 2'-O-methylcytidine-3'-phosphate
  modified_base 7: mod_base = OTHER; note = 2'-fluorocytidine-3'-phosphate
  modified_base 8: mod_base = OTHER; note = 2'-O-methyladenosine-3'-phosphate
  modified_base 9: mod_base = OTHER; note = 2'-fluoroadenosine-3'-phosphate
  modified_base 10: mod_base = OTHER; note = 2'-fluorouridine-3'-phosphate
  modified_base 11: mod_base = OTHER; note = 2'-fluoroadenosine-3'-phosphate
  modified_base 12: mod_base = OTHER; note = 2'-O-methyluridine-3'-phosphate
  modified_base 13: mod_base = OTHER; note = 2'-O-methylguanosine-3'-phosphate
  modified_base 14: mod_base = OTHER; note = 2'-O-methylguanosine-3'-phosphate
  modified_base 15: mod_base = OTHER; note = 2'-O-methylcytidine-3'-phosphate
  modified_base 16: mod_base = OTHER; note = 2'-O-methyladenosine-3'-phosphate
  modified_base 17: mod_base = OTHER; note = 2'-O-methyladenosine-3'-phosphate
  modified_base 18: mod_base = OTHER; note = 2'-O-methylcytidine-3'-phosphate
  modified_base 19: mod_base = OTHER; note = 2'-O-methyluridine-3'-phosphate
  modified_base 20: mod_base = OTHER; note = 2'-O-methylcytidine-3'-phosphate
  modified_base 21: mod_base = OTHER; note = 2'-O-methyluridine-3'-phosphate N-[tris(GalNAc-alkyl)-amidodecanoyl)]-4-hydroxyprolinol Hyp-(GalNAc-alkyl)3
caagtccaatatggcaactct

SEQ ID NO: 3677 - RNA, 21 nt, synthetic construct
  source 1..21: mol_type = other RNA; note = Description of Artificial Sequence: Synthetic oligonucleotide
  modified_base 1: mod_base = OTHER; note = 2'-O-methyluridine-3'-phosphorothioate
  modified_base 2: mod_base = OTHER; note = 2'-O-methylcytidine-3'-phosphorothioate
  modified_base 3: mod_base = OTHER; note = 2'-O-methylcytidine-3'-phosphate
  modified_base 4: mod_base = OTHER; note = 2'-O-methyladenosine-3'-phosphate
  modified_base 5: mod_base = OTHER; note = 2'-O-methylcytidine-3'-phosphate
  modified_base 6: mod_base = OTHER; note = 2'-O-methylcytidine-3'-phosphate
  modified_base 7: mod_base = OTHER; note = 2'-fluoroadenosine-3'-phosphate
  modified_base 8: mod_base = OTHER; note = 2'-O-methyluridine-3'-phosphate
  modified_base 9: mod_base = OTHER; note = 2'-fluoroguanosine-3'-phosphate
  modified_base 10: mod_base = OTHER; note = 2'-fluoroadenosine-3'-phosphate
  modified_base 11: mod_base = OTHER; note = 2'-fluorouridine-3'-phosphate
  modified_base 12: mod_base = OTHER; note = 2'-O-methyluridine-3'-phosphate
  modified_base 13: mod_base = OTHER; note = 2'-O-methyladenosine-3'-phosphate
  modified_base 14: mod_base = OTHER; note = 2'-O-methyladenosine-3'-phosphate
  modified_base 15: mod_base = OTHER; note = 2'-O-methylguanosine-3'-phosphate
  modified_base 16: mod_base = OTHER; note = 2'-O-methylguanosine-3'-phosphate
  modified_base 17: mod_base = OTHER; note = 2'-O-methylguanosine-3'-phosphate
  modified_base 18: mod_base = OTHER; note = 2'-O-methyluridine-3'-phosphate
  modified_base 19: mod_base = OTHER; note = 2'-O-methylcytidine-3'-phosphate
  modified_base 20: mod_base = OTHER; note = 2'-O-methyluridine-3'-phosphate
  modified_base 21: mod_base = OTHER; note = 2'-O-methyluridine-3'-phosphate N-[tris(GalNAc-alkyl)-amidodecanoyl)]-4-hydroxyprolinol Hyp-(GalNAc-alkyl)3
tccaccatgattaagggtctt

SEQ ID NO: 3678 - RNA, 21 nt, synthetic construct
  source 1..21: mol_type = other RNA; note = Description of Artificial Sequence: Synthetic oligonucleotide
  modified_base 1: mod_base = OTHER; note = 2'-O-methyluridine-3'-phosphorothioate
  modified_base 2: mod_base = OTHER; note = 2'-O-methylcytidine-3'-phosphorothioate
  modified_base 3: mod_base = OTHER; note = 2'-O-methyladenosine-3'-phosphate
  modified_base 4: mod_base = OTHER; note = 2'-O-methyluridine-3'-phosphate
  modified_base 5: mod_base = OTHER; note = 2'-O-methyluridine-3'-phosphate
  modified_base 6: mod_base = OTHER; note = 2'-O-methyluridine-3'-phosphate
  modified_base 7: mod_base = OTHER; note = 2'-fluorocytidine-3'-phosphate
  modified_base 8: mod_base = OTHER; note = 2'-O-methyladenosine-3'-phosphate
  modified_base 9: mod_base = OTHER; note = 2'-fluorocytidine-3'-phosphate
  modified_base 10: mod_base = OTHER; note = 2'-fluorouridine-3'-phosphate
  modified_base 11: mod_base = OTHER; note = 2'-fluoroguanosine-3'-phosphate
  modified_base 12: mod_base = OTHER; note = 2'-O-methyluridine-3'-phosphate
  modified_base 13: mod_base = OTHER; note = 2'-O-methylcytidine-3'-phosphate
  modified_base 14: mod_base = OTHER; note = 2'-O-methyluridine-3'-phosphate
  modified_base 15: mod_base = OTHER; note = 2'-O-methyladenosine-3'-phosphate
  modified_base 16: mod_base = OTHER; note = 2'-O-methylguanosine-3'-phosphate
  modified_base 17: mod_base = OTHER; note = 2'-O-methylguanosine-3'-phosphate
  modified_base 18: mod_base = OTHER; note = 2'-O-methylcytidine-3'-phosphate
  modified_base 19: mod_base = OTHER; note = 2'-O-methyluridine-3'-phosphate
  modified_base 20: mod_base = OTHER; note = 2'-O-methyladenosine-3'-phosphate
  modified_base 21: mod_base = OTHER; note = 2'-O-methyladenosine-3'-phosphate N-[tris(GalNAc-alkyl)-amidodecanoyl)]-4-hydroxyprolinol Hyp-(GalNAc-alkyl)3
tcatttcactgtctaggctaa

SEQ ID NO: 3679 - RNA, 21 nt, synthetic construct
  source 1..21: mol_type = other RNA; note = Description of Artificial Sequence: Synthetic oligonucleotide
  modified_base 1: mod_base = OTHER; note = 2'-O-methyluridine-3'-phosphorothioate
  modified_base 2: mod_base = OTHER; note = 2'-O-methylguanosine-3'-phosphorothioate
  modified_base 3: mod_base = OTHER; note = 2'-O-methyluridine-3'-phosphate
  modified_base 4: mod_base = OTHER; note = 2'-O-methylcytidine-3'-phosphate
  modified_base 5: mod_base = OTHER; note = 2'-O-methylcytidine-3'-phosphate
  modified_base 6: mod_base = OTHER; note = 2'-O-methyluridine-3'-phosphate
  modified_base 7: mod_base = OTHER; note = 2'-fluorouridine-3'-phosphate
  modified_base 8: mod_base = OTHER; note = 2'-O-methyluridine-3'-phosphate
  modified_base 9: mod_base = OTHER; note = 2'-fluorouridine-3'-phosphate
  modified_base 10: mod_base = OTHER; note = 2'-fluorouridine-3'-phosphate
  modified_base 11: mod_base = OTHER; note = 2'-fluoroadenosine-3'-phosphate
  modified_base 12: mod_base = OTHER; note = 2'-O-methyluridine-3'-phosphate
  modified_base 13: mod_base = OTHER; note = 2'-O-methylcytidine-3'-phosphate
  modified_base 14: mod_base = OTHER; note = 2'-O-methyluridine-3'-phosphate
  modified_base 15: mod_base = OTHER; note = 2'-O-methylguanosine-3'-phosphate
  modified_base 16: mod_base = OTHER; note = 2'-O-methyladenosine-3'-phosphate
  modified_base 17: mod_base = OTHER; note = 2'-O-methyluridine-3'-phosphate
  modified_base 18: mod_base = OTHER; note = 2'-O-methylcytidine-3'-phosphate
  modified_base 19: mod_base = OTHER; note = 2'-O-methyluridine-3'-phosphate
  modified_base 20: mod_base = OTHER; note = 2'-O-methylguanosine-3'-phosphate
  modified_base 21: mod_base = OTHER; note = 2'-O-methyluridine-3'-phosphate N-[tris(GalNAc-alkyl)-amidodecanoyl)]-4-hydroxyprolinol Hyp-(GalNAc-alkyl)3
tgtcctttttatctgatctgt

SEQ ID NO: 3680 - RNA, 21 nt, synthetic construct
  source 1..21: mol_type = other RNA; note = Description of Artificial Sequence: Synthetic oligonucleotide
  modified_base 1: mod_base = OTHER; note = 2'-O-methylcytidine-3'-phosphorothioate
  modified_base 2: mod_base = OTHER; note = 2'-O-methylcytidine-3'-phosphorothioate
  modified_base 3: mod_base = OTHER; note = 2'-O-methyladenosine-3'-phosphate
  modified_base 4: mod_base = OTHER; note = 2'-O-methylguanosine-3'-phosphate
  modified_base 5: mod_base = OTHER; note = 2'-O-methyluridine-3'-phosphate
  modified_base 6: mod_base = OTHER; note = 2'-O-methylguanosine-3'-phosphate
  modified_base 7: mod_base = OTHER; note = 2'-fluorouridine-3'-phosphate
  modified_base 8: mod_base = OTHER; note = 2'-O-methyladenosine-3'-phosphate
  modified_base 9: mod_base = OTHER; note = 2'-fluorouridine-3'-phosphate
  modified_base 10: mod_base = OTHER; note = 2'-fluoroadenosine-3'-phosphate
  modified_base 11: mod_base = OTHER; note = 2'-fluoroadenosine-3'-phosphate
  modified_base 12: mod_base = OTHER; note = 2'-O-methyladenosine-3'-phosphate
  modified_base 13: mod_base = OTHER; note = 2'-O-methyluridine-3'-phosphate
  modified_base 14: mod_base = OTHER; note = 2'-O-methylcytidine-3'-phosphate
  modified_base 15: mod_base = OTHER; note = 2'-O-methylcytidine-3'-phosphate
  modified_base 16: mod_base = OTHER; note = 2'-O-methyladenosine-3'-phosphate
  modified_base 17: mod_base = OTHER; note = 2'-O-methyladenosine-3'-phosphate
  modified_base 18: mod_base = OTHER; note = 2'-O-methyluridine-3'-phosphate
  modified_base 19: mod_base = OTHER; note = 2'-O-methyladenosine-3'-phosphate
  modified_base 20: mod_base = OTHER; note = 2'-O-methyluridine-3'-phosphate
  modified_base 21: mod_base = OTHER; note = 2'-O-methyladenosine-3'-phosphate N-[tris(GalNAc-alkyl)-amidodecanoyl)]-4-hydroxyprolinol Hyp-(GalNAc-alkyl)3
ccagtgtataaatccaatata

SEQ ID NO: 3681 - RNA, 21 nt, synthetic construct
  source 1..21: mol_type = other RNA; note = Description of Artificial Sequence: Synthetic oligonucleotide
  modified_base 1: mod_base = OTHER; note = 2'-O-methyluridine-3'-phosphorothioate
  modified_base 2: mod_base = OTHER; note = 2'-O-methylcytidine-3'-phosphorothioate
  modified_base 3: mod_base = OTHER; note = 2'-O-methylcytidine-3'-phosphate
  modified_base 4: mod_base = OTHER; note = 2'-O-methyladenosine-3'-phosphate
  modified_base 5: mod_base = OTHER; note = 2'-O-methyladenosine-3'-phosphate
  modified_base 6: mod_base = OTHER; note = 2'-O-methylguanosine-3'-phosphate
  modified_base 7: mod_base = OTHER; note = 2'-fluorouridine-3'-phosphate
  modified_base 8: mod_base = OTHER; note = 2'-O-methylguanosine-3'-phosphate
  modified_base 9: mod_base = OTHER; note = 2'-fluorouridine-3'-phosphate
  modified_base 10: mod_base = OTHER; note = 2'-fluorouridine-3'-phosphate
  modified_base 11: mod_base = OTHER; note = 2'-fluoroadenosine-3'-phosphate
  modified_base 12: mod_base = OTHER; note = 2'-O-methyluridine-3'-phosphate
  modified_base 13: mod_base = OTHER; note = 2'-O-methyladenosine-3'-phosphate
  modified_base 14: mod_base = OTHER; note = 2'-O-methylcytidine-3'-phosphate
  modified_base 15: mod_base = OTHER; note = 2'-O-methylcytidine-3'-phosphate
  modified_base 16: mod_base = OTHER; note = 2'-O-methyladenosine-3'-phosphate
  modified_base 17: mod_base = OTHER; note = 2'-O-methyladenosine-3'-phosphate
  modified_base 18: mod_base = OTHER; note = 2'-O-methylcytidine-3'-phosphate
  modified_base 19: mod_base = OTHER; note = 2'-O-methyluridine-3'-phosphate
  modified_base 20: mod_base = OTHER; note = 2'-O-methyladenosine-3'-phosphate
  modified_base 21: mod_base = OTHER; note = 2'-O-methyladenosine-3'-phosphate N-[tris(GalNAc-alkyl)-amidodecanoyl)]-4-hydroxyprolinol Hyp-(GalNAc-alkyl)3
tccaagtgttataccaactaa

SEQ ID NO: 3682 - RNA, 21 nt, synthetic construct
  source 1..21: mol_type = other RNA; note = Description of Artificial Sequence: Synthetic oligonucleotide
  modified_base 1: mod_base = OTHER; note = 2'-O-methylguanosine-3'-phosphorothioate
  modified_base 2: mod_base = OTHER; note = 2'-O-methyladenosine-3'-phosphorothioate
  modified_base 3: mod_base = OTHER; note = 2'-O-methyladenosine-3'-phosphate
  modified_base 4: mod_base = OTHER; note = 2'-O-methylcytidine-3'-phosphate
  modified_base 5: mod_base = OTHER; note = 2'-O-methyladenosine-3'-phosphate
  modified_base 6: mod_base = OTHER; note = 2'-O-methylcytidine-3'-phosphate
  modified_base 7: mod_base = OTHER; note = 2'-fluorocytidine-3'-phosphate
  modified_base 8: mod_base = OTHER; note = 2'-O-methyladenosine-3'-phosphate
  modified_base 9: mod_base = OTHER; note = 2'-fluoroadenosine-3'-phosphate
  modified_base 10: mod_base = OTHER; note = 2'-fluoroadenosine-3'-phosphate
  modified_base 11: mod_base = OTHER; note = 2'-fluoroguanosine-3'-phosphate
  modified_base 12: mod_base = OTHER; note = 2'-O-methyladenosine-3'-phosphate
  modified_base 13: mod_base = OTHER; note = 2'-O-methyluridine-3'-phosphate
  modified_base 14: mod_base = OTHER; note = 2'-O-methyluridine-3'-phosphate
  modified_base 15: mod_base = OTHER; note = 2'-O-methylguanosine-3'-phosphate
  modified_base 16: mod_base = OTHER; note = 2'-O-methyluridine-3'-phosphate
  modified_base 17: mod_base = OTHER; note = 2'-O-methylcytidine-3'-phosphate
  modified_base 18: mod_base = OTHER; note = 2'-O-methyluridine-3'-phosphate
  modified_base 19: mod_base = OTHER; note = 2'-O-methylcytidine-3'-phosphate
  modified_base 20: mod_base = OTHER; note = 2'-O-methyluridine-3'-phosphate
  modified_base 21: mod_base = OTHER; note = 2'-O-methyladenosine-3'-phosphate N-[tris(GalNAc-alkyl)-amidodecanoyl)]-4-hydroxyprolinol Hyp-(GalNAc-alkyl)3
gaacaccaaagattgtctcta

SEQ ID NO: 3683 - RNA, 21 nt, synthetic construct
  source 1..21: mol_type = other RNA; note = Description of Artificial Sequence: Synthetic oligonucleotide
  modified_base 1: mod_base = OTHER; note = 2'-O-methyladenosine-3'-phosphorothioate
  modified_base 2: mod_base = OTHER; note = 2'-O-methyladenosine-3'-phosphorothioate
  modified_base 3: mod_base = OTHER; note = 2'-O-methylcytidine-3'-phosphate
  modified_base 4: mod_base = OTHER; note = 2'-O-methyladenosine-3'-phosphate
  modified_base 5: mod_base = OTHER; note = 2'-O-methylcytidine-3'-phosphate
  modified_base 6: mod_base = OTHER; note = 2'-O-methylcytidine-3'-phosphate
  modified_base 7: mod_base = OTHER; note = 2'-fluoroadenosine-3'-phosphate
  modified_base 8: mod_base = OTHER; note = 2'-O-methyladenosine-3'-phosphate
  modified_base 9: mod_base = OTHER; note = 2'-fluoroadenosine-3'-phosphate
  modified_base 10: mod_base = OTHER; note = 2'-fluoroguanosine-3'-phosphate
  modified_base 11: mod_base = OTHER; note = 2'-fluoroadenosine-3'-phosphate
  modified_base 12: mod_base = OTHER; note = 2'-O-methyluridine-3'-phosphate
  modified_base 13: mod_base = OTHER; note = 2'-O-methyluridine-3'-phosphate
  modified_base 14: mod_base = OTHER; note = 2'-O-methylguanosine-3'-phosphate
  modified_base 15: mod_base = OTHER; note = 2'-O-methyluridine-3'-phosphate
  modified_base 16: mod_base = OTHER; note = 2'-O-methylcytidine-3'-phosphate
  modified_base 17: mod_base = OTHER; note = 2'-O-methyluridine-3'-phosphate
  modified_base 18: mod_base = OTHER; note = 2'-O-methylcytidine-3'-phosphate
  modified_base 19: mod_base = OTHER; note = 2'-O-methyluridine-3'-phosphate
  modified_base 20: mod_base = OTHER; note = 2'-O-methylguanosine-3'-phosphate
  modified_base 21: mod_base = OTHER; note = 2'-O-methyladenosine-3'-phosphate N-[tris(GalNAc-alkyl)-amidodecanoyl)]-4-hydroxyprolinol Hyp-(GalNAc-alkyl)3
aacaccaaagattgtctctga

SEQ ID NO: 3684 - RNA, 21 nt, synthetic construct
  source 1..21: mol_type = other RNA; note = Description of Artificial Sequence: Synthetic oligonucleotide
  modified_base 1: mod_base = OTHER; note = 2'-O-methyladenosine-3'-phosphorothioate
  modified_base 2: mod_base = OTHER; note = 2'-O-methyluridine-3'-phosphorothioate
  modified_base 3: mod_base = OTHER; note = 2'-O-methylguanosine-3'-phosphate
  modified_base 4: mod_base = OTHER; note = 2'-O-methyluridine-3'-phosphate
  modified_base 5: mod_base = OTHER; note = 2'-O-methyluridine-3'-phosphate
  modified_base 6: mod_base = OTHER; note = 2'-O-methylguanosine-3'-phosphate
  modified_base 7: mod_base = OTHER; note = 2'-fluorouridine-3'-phosphate
  modified_base 8: mod_base = OTHER; note = 2'-O-methylcytidine-3'-phosphate
  modified_base 9: mod_base = OTHER; note = 2'-fluorocytidine-3'-phosphate
  modified_base 10: mod_base = OTHER; note = 2'-fluorouridine-3'-phosphate
  modified_base 11: mod_base = OTHER; note = 2'-fluorouridine-3'-phosphate
  modified_base 12: mod_base = OTHER; note = 2'-O-methyluridine-3'-phosphate
  modified_base 13: mod_base = OTHER; note = 2'-O-methyluridine-3'-phosphate
  modified_base 14: mod_base = OTHER; note = 2'-O-methyluridine-3'-phosphate
  modified_base 15: mod_base = OTHER; note = 2'-O-methyladenosine-3'-phosphate
  modified_base 16: mod_base = OTHER; note = 2'-O-methyluridine-3'-phosphate
  modified_base 17: mod_base = OTHER; note = 2'-O-methylcytidine-3'-phosphate
  modified_base 18: mod_base = OTHER; note = 2'-O-methyluridine-3'-phosphate
  modified_base 19: mod_base = OTHER; note = 2'-O-methylguanosine-3'-phosphate
  modified_base 20: mod_base = OTHER; note = 2'-O-methyladenosine-3'-phosphate
  modified_base 21: mod_base = OTHER; note = 2'-O-methyluridine-3'-phosphate N-[tris(GalNAc-alkyl)-amidodecanoyl)]-4-hydroxyprolinol Hyp-(GalNAc-alkyl)3
atgttgtcctttttatctgat

SEQ ID NO: 3685 - RNA, 21 nt, synthetic construct
  source 1..21: mol_type = other RNA; note = Description of Artificial Sequence: Synthetic oligonucleotide
  modified_base 1: mod_base = OTHER; note = 2'-O-methyluridine-3'-phosphorothioate
  modified_base 2: mod_base = OTHER; note = 2'-O-methylcytidine-3'-phosphorothioate
  modified_base 3: mod_base = OTHER; note = 2'-O-methyladenosine-3'-phosphate
  modified_base 4: mod_base = OTHER; note = 2'-O-methyladenosine-3'-phosphate
  modified_base 5: mod_base = OTHER; note = 2'-O-methylcytidine-3'-phosphate
  modified_base 6: mod_base = OTHER; note = 2'-O-methyluridine-3'-phosphate
  modified_base 7: mod_base = OTHER; note = 2'-fluorocytidine-3'-phosphate
  modified_base 8: mod_base = OTHER; note = 2'-O-methylcytidine-3'-phosphate
  modified_base 9: mod_base = OTHER; note = 2'-fluorouridine-3'-phosphate
  modified_base 10: mod_base = OTHER; note = 2'-fluoroguanosine-3'-phosphate
  modified_base 11: mod_base = OTHER; note = 2'-fluoroadenosine-3'-phosphate
  modified_base 12: mod_base = OTHER; note = 2'-O-methyladenosine-3'-phosphate
  modified_base 13: mod_base = OTHER; note = 2'-O-methylguanosine-3'-phosphate
  modified_base 14: mod_base = OTHER; note = 2'-O-methyluridine-3'-phosphate
  modified_base 15: mod_base = OTHER; note = 2'-O-methyluridine-3'-phosphate
  modified_base 16: mod_base = OTHER; note = 2'-O-methyladenosine-3'-phosphate
  modified_base 17: mod_base = OTHER; note = 2'-O-methylguanosine-3'-phosphate
  modified_base 18: mod_base = OTHER; note = 2'-O-methyladenosine-3'-phosphate
  modified_base 19: mod_base = OTHER; note = 2'-O-methyladenosine-3'-phosphate
  modified_base 20: mod_base = OTHER; note = 2'-O-methyladenosine-3'-phosphate
  modified_base 21: mod_base = OTHER; note = 2'-O-methyluridine-3'-phosphate N-[tris(GalNAc-alkyl)-amidodecanoyl)]-4-hydroxyprolinol Hyp-(GalNAc-alkyl)3
tcaactcctgaagttagaaat

SEQ ID NO: 3686 - RNA, 21 nt, synthetic construct
  source 1..21: mol_type = other RNA; note = Description of Artificial Sequence: Synthetic oligonucleotide
  modified_base 1: mod_base = OTHER; note = 2'-O-methyladenosine-3'-phosphorothioate
  modified_base 2: mod_base = OTHER; note = 2'-O-methyladenosine-3'-phosphorothioate
  modified_base 3: mod_base = OTHER; note = 2'-O-methylcytidine-3'-phosphate
  modified_base 4: mod_base = OTHER; note = 2'-O-methyluridine-3'-phosphate
  modified_base 5: mod_base = OTHER; note = 2'-O-methyladenosine-3'-phosphate
  modified_base 6: mod_base = OTHER; note = 2'-O-methyluridine-3'-phosphate
  modified_base 7: mod_base = OTHER; note = 2'-fluorocytidine-3'-phosphate
  modified_base 8: mod_base = OTHER; note = 2'-O-methylcytidine-3'-phosphate
  modified_base 9: mod_base = OTHER; note = 2'-fluoroadenosine-3'-phosphate
  modified_base 10: mod_base = OTHER; note = 2'-fluoroadenosine-3'-phosphate
  modified_base 11: mod_base = OTHER; note = 2'-fluoroguanosine-3'-phosphate
  modified_base 12: mod_base = OTHER; note = 2'-O-methyluridine-3'-phosphate
  modified_base 13: mod_base = OTHER; note = 2'-O-methylguanosine-3'-phosphate
  modified_base 14: mod_base = OTHER; note = 2'-O-methyluridine-3'-phosphate
  modified_base 15: mod_base = OTHER; note = 2'-O-methyluridine-3'-phosphate
  modified_base 16: mod_base = OTHER; note = 2'-O-methyladenosine-3'-phosphate
  modified_base 17: mod_base = OTHER; note = 2'-O-methyluridine-3'-phosphate
  modified_base 18: mod_base = OTHER; note = 2'-O-methyladenosine-3'-phosphate
  modified_base 19: mod_base = OTHER; note = 2'-O-methylcytidine-3'-phosphate
  modified_base 20: mod_base = OTHER; note = 2'-O-methylcytidine-3'-phosphate
  modified_base 21: mod_base = OTHER; note = 2'-O-methyladenosine-3'-phosphate N-[tris(GalNAc-alkyl)-amidodecanoyl)]-4-hydroxyprolinol Hyp-(GalNAc-alkyl)3
aactatccaagtgttatacca

SEQ ID NO: 3687 - RNA, 21 nt, synthetic construct
  source 1..21: mol_type = other RNA; note = Description of Artificial Sequence: Synthetic oligonucleotide
  modified_base 1: mod_base = OTHER; note = 2'-O-methylguanosine-3'-phosphorothioate
  modified_base 2: mod_base = OTHER; note = 2'-O-methylguanosine-3'-phosphorothioate
  modified_base 3: mod_base = OTHER; note = 2'-O-methyluridine-3'-phosphate
  modified_base 4: mod_base = OTHER; note = 2'-O-methyladenosine-3'-phosphate
  modified_base 5: mod_base = OTHER; note = 2'-O-methyluridine-3'-phosphate
  modified_base 6: mod_base = OTHER; note = 2'-O-methyluridine-3'-phosphate
  modified_base 7: mod_base = OTHER; note = 2'-fluoroadenosine-3'-phosphate
  modified_base 8: mod_base = OTHER; note = 2'-O-methyladenosine-3'-phosphate
  modified_base 9: mod_base = OTHER; note = 2'-fluorouridine-3'-phosphate
  modified_base 10: mod_base = OTHER; note = 2'-fluorocytidine-3'-phosphate
  modified_base 11: mod_base = OTHER; note = 2'-fluorouridine-3'-phosphate
  modified_base 12: mod_base = OTHER; note = 2'-O-methyluridine-3'-phosphate
  modified_base 13: mod_base = OTHER; note = 2'-O-methylguanosine-3'-phosphate
  modified_base 14: mod_base = OTHER; note = 2'-O-methyluridine-3'-phosphate
  modified_base 15: mod_base = OTHER; note = 2'-O-methylguanosine-3'-phosphate
  modified_base 16: mod_base = OTHER; note = 2'-O-methyluridine-3'-phosphate
  modified_base 17: mod_base = OTHER; note = 2'-O-methyladenosine-3'-phosphate
  modified_base 18: mod_base = OTHER; note = 2'-O-methylguanosine-3'-phosphate
  modified_base 19: mod_base = OTHER; note = 2'-O-methyluridine-3'-phosphate
  modified_base 20: mod_base = OTHER; note = 2'-O-methylcytidine-3'-phosphate
  modified_base 21: mod_base = OTHER; note = 2'-O-methyluridine-3'-phosphate N-[tris(GalNAc-alkyl)-amidodecanoyl)]-4-hydroxyprolinol Hyp-(GalNAc-alkyl)3
ggtattaatcttgtgtagtct

SEQ ID NO: 3688 - RNA, 21 nt, synthetic construct
  source 1..21: mol_type = other RNA; note = Description of Artificial Sequence: Synthetic oligonucleotide
  modified_base 1: mod_base = OTHER; note = 2'-O-methylguanosine-3'-phosphorothioate
  modified_base 2: mod_base = OTHER; note = 2'-O-methylguanosine-3'-phosphorothioate
  modified_base 3: mod_base = OTHER; note = 2'-O-methylcytidine-3'-phosphate
  modified_base 4: mod_base = OTHER; note = 2'-O-methyluridine-3'-phosphate
  modified_base 5: mod_base = OTHER; note = 2'-O-methylcytidine-3'-phosphate
  modified_base 6: mod_base = OTHER; note = 2'-O-methylcytidine-3'-phosphate
  modified_base 7: mod_base = OTHER; note = 2'-fluorouridine-3'-phosphate
  modified_base 8: mod_base = OTHER; note = 2'-O-methyluridine-3'-phosphate
  modified_base 9: mod_base = OTHER; note = 2'-fluorocytidine-3'-phosphate
  modified_base 10: mod_base = OTHER; note = 2'-fluoroadenosine-3'-phosphate
  modified_base 11: mod_base = OTHER; note = 2'-fluorocytidine-3'-phosphate
  modified_base 12: mod_base = OTHER; note = 2'-O-methyluridine-3'-phosphate
  modified_base 13: mod_base = OTHER; note = 2'-O-methylguanosine-3'-phosphate
  modified_base 14: mod_base = OTHER; note = 2'-O-methyladenosine-3'-phosphate
  modified_base 15: mod_base = OTHER; note = 2'-O-methyladenosine-3'-phosphate
  modified_base 16: mod_base = OTHER; note = 2'-O-methylcytidine-3'-phosphate
  modified_base 17: mod_base = OTHER; note = 2'-O-methyladenosine-3'-phosphate
  modified_base 18: mod_base = OTHER; note = 2'-O-methyluridine-3'-phosphate
  modified_base 19: mod_base = OTHER; note = 2'-O-methylguanosine-3'-phosphate
  modified_base 20: mod_base = OTHER; note = 2'-O-methylcytidine-3'-phosphate
  modified_base 21: mod_base = OTHER; note = 2'-O-methyladenosine-3'-phosphate N-[tris(GalNAc-alkyl)-amidodecanoyl)]-4-hydroxyprolinol Hyp-(GalNAc-alkyl)3
ggctccttcactgaacatgca

SEQ ID NO: 3689 - RNA, 21 nt, synthetic construct
  source 1..21: mol_type = other RNA; note = Description of Artificial Sequence: Synthetic oligonucleotide
  modified_base 1: mod_base = OTHER; note = 2'-O-methyluridine-3'-phosphorothioate
  modified_base 2: mod_base = OTHER; note = 2'-O-methyladenosine-3'-phosphorothioate
  modified_base 3: mod_base = OTHER; note = 2'-O-methyluridine-3'-phosphate
  modified_base 4: mod_base = OTHER; note = 2'-O-methylcytidine-3'-phosphate
  modified_base 5: mod_base = OTHER; note = 2'-O-methyladenosine-3'-phosphate
  modified_base 6: mod_base = OTHER; note = 2'-O-methylguanosine-3'-phosphate
  modified_base 7: mod_base = OTHER; note = 2'-fluorouridine-3'-phosphate
  modified_base 8: mod_base = OTHER; note = 2'-O-methyladenosine-3'-phosphate
  modified_base 9: mod_base = OTHER; note = 2'-fluoroguanosine-3'-phosphate
  modified_base 10: mod_base = OTHER; note = 2'-fluorouridine-3'-phosphate
  modified_base 11: mod_base = OTHER; note = 2'-fluoroguanosine-3'-phosphate
  modified_base 12: mod_base = OTHER; note = 2'-O-methyluridine-3'-phosphate
  modified_base 13: mod_base = OTHER; note = 2'-O-methyladenosine-3'-phosphate
  modified_base 14: mod_base = OTHER; note = 2'-O-methylcytidine-3'-phosphate
  modified_base 15: mod_base = OTHER; note = 2'-O-methyladenosine-3'-phosphate
  modified_base 16: mod_base = OTHER; note = 2'-O-methyluridine-3'-phosphate
  modified_base 17: mod_base = OTHER; note = 2'-O-methyluridine-3'-phosphate
  modified_base 18: mod_base = OTHER; note = 2'-O-methyladenosine-3'-phosphate
  modified_base 19: mod_base = OTHER; note = 2'-O-methylcytidine-3'-phosphate
  modified_base 20: mod_base = OTHER; note = 2'-O-methylcytidine-3'-phosphate
  modified_base 21: mod_base = OTHER; note = 2'-O-methyladenosine-3'-phosphate N-[tris(GalNAc-alkyl)-amidodecanoyl)]-4-hydroxyprolinol Hyp-(GalNAc-alkyl)3
tatcagtagtgtacattacca

SEQ ID NO: 3690 - RNA, 21 nt, synthetic construct
  source 1..21: mol_type = other RNA; note = Description of Artificial Sequence: Synthetic oligonucleotide
  modified_base 1: mod_base = OTHER; note = 2'-O-methylcytidine-3'-phosphorothioate
  modified_base 2: mod_base = OTHER; note = 2'-O-methyladenosine-3'-phosphorothioate
  modified_base 3: mod_base = OTHER; note = 2'-O-methylguanosine-3'-phosphate
  modified_base 4: mod_base = OTHER; note = 2'-O-methylcytidine-3'-phosphate
  modified_base 5: mod_base = OTHER; note = 2'-O-methylcytidine-3'-phosphate
  modified_base 6: mod_base = OTHER; note = 2'-O-methyluridine-3'-phosphate
  modified_base 7: mod_base = OTHER; note = 2'-fluorouridine-3'-phosphate
  modified_base 8: mod_base = OTHER; note = 2'-O-methyluridine-3'-phosphate
  modified_base 9: mod_base = OTHER; note = 2'-fluorouridine-3'-phosphate
  modified_base 10: mod_base = OTHER; note = 2'-fluorocytidine-3'-phosphate
  modified_base 11: mod_base = OTHER; note = 2'-fluorocytidine-3'-phosphate
  modified_base 12: mod_base = OTHER; note = 2'-O-methyluridine-3'-phosphate
  modified_base 13: mod_base = OTHER; note = 2'-O-methyluridine-3'-phosphate
  modified_base 14: mod_base = OTHER; note = 2'-O-methyladenosine-3'-phosphate
  modified_base 15: mod_base = OTHER; note = 2'-O-methylguanosine-3'-phosphate
  modified_base 16: mod_base = OTHER; note = 2'-O-methyladenosine-3'-phosphate
  modified_base 17: mod_base = OTHER; note = 2'-O-methyladenosine-3'-phosphate
  modified_base 18: mod_base = OTHER; note = 2'-O-methylcytidine-3'-phosphate
  modified_base 19: mod_base = OTHER; note = 2'-O-methyladenosine-3'-phosphate
  modified_base 20: mod_base = OTHER; note = 2'-O-methylcytidine-3'-phosphate
  modified_base 21: mod_base = OTHER; note = 2'-O-methyladenosine-3'-phosphate N-[tris(GalNAc-alkyl)-amidodecanoyl)]-4-hydroxyprolinol Hyp-(GalNAc-alkyl)3
cagccttttccttagaacaca

SEQ ID NO: 3691 - RNA, 21 nt, synthetic construct
  source 1..21: mol_type = other RNA; note = Description of Artificial Sequence: Synthetic oligonucleotide
  modified_base 1: mod_base = OTHER; note = 2'-O-methylcytidine-3'-phosphorothioate
  modified_base 2: mod_base = OTHER; note = 2'-O-methyluridine-3'-phosphorothioate
  modified_base 3: mod_base = OTHER; note = 2'-O-methylguanosine-3'-phosphate
  modified_base 4: mod_base = OTHER; note = 2'-O-methylguanosine-3'-phosphate
  modified_base 5: mod_base = OTHER; note = 2'-O-methyluridine-3'-phosphate
  modified_base 6: mod_base = OTHER; note = 2'-O-methyluridine-3'-phosphate
  modified_base 7: mod_base = OTHER; note = 2'-fluoroadenosine-3'-phosphate
  modified_base 8: mod_base = OTHER; note = 2'-O-methylguanosine-3'-phosphate
  modified_base 9: mod_base = OTHER; note = 2'-fluorouridine-3'-phosphate
  modified_base 10: mod_base = OTHER; note = 2'-fluoroguanosine-3'-phosphate
  modified_base 11: mod_base = OTHER; note = 2'-fluorouridine-3'-phosphate
  modified_base 12: mod_base = OTHER; note = 2'-O-methylguanosine-3'-phosphate
  modified_base 13: mod_base = OTHER; note = 2'-O-methyladenosine-3'-phosphate
  modified_base 14: mod_base = OTHER; note = 2'-O-methyladenosine-3'-phosphate
  modified_base 15: mod_base = OTHER; note = 2'-O-methyladenosine-3'-phosphate
  modified_base 16: mod_base = OTHER; note = 2'-O-methyluridine-3'-phosphate
  modified_base 17: mod_base = OTHER; note = 2'-O-methyladenosine-3'-phosphate
  modified_base 18: mod_base = OTHER; note = 2'-O-methylguanosine-3'-phosphate
  modified_base 19: mod_base = OTHER; note = 2'-O-methyluridine-3'-phosphate
  modified_base 20: mod_base = OTHER; note = 2'-O-methyluridine-3'-phosphate
  modified_base 21: mod_base = OTHER; note = 2'-O-methyladenosine-3'-phosphate N-[tris(GalNAc-alkyl)-amidodecanoyl)]-4-hydroxyprolinol Hyp-(GalNAc-alkyl)3
ctggttagtgtgaaatagtta

SEQ ID NO: 3692 - RNA, 21 nt, synthetic construct
  source 1..21: mol_type = other RNA; note = Description of Artificial Sequence: Synthetic oligonucleotide
  modified_base 1: mod_base = OTHER; note = 2'-O-methyladenosine-3'-phosphorothioate
  modified_base 2: mod_base = OTHER; note = 2'-O-methylcytidine-3'-phosphorothioate
  modified_base 3: mod_base = OTHER; note = 2'-O-methyluridine-3'-phosphate
  modified_base 4: mod_base = OTHER; note = 2'-O-methyladenosine-3'-phosphate
  modified_base 5: mod_base = OTHER; note = 2'-O-methyluridine-3'-phosphate
  modified_base 6: mod_base = OTHER; note = 2'-O-methyladenosine-3'-phosphate
  modified_base 7: mod_base = OTHER; note = 2'-fluorouridine-3'-phosphate
  modified_base 8: mod_base = OTHER; note = 2'-O-methylcytidine-3'-phosphate
  modified_base 9: mod_base = OTHER; note = 2'-fluoroadenosine-3'-phosphate
  modified_base 10: mod_base = OTHER; note = 2'-fluoroguanosine-3'-phosphate
  modified_base 11: mod_base = OTHER; note = 2'-fluorouridine-3'-phosphate
  modified_base 12: mod_base = OTHER; note = 2'-O-methyladenosine-3'-phosphate
  modified_base 13: mod_base = OTHER; note = 2'-O-methylguanosine-3'-phosphate
  modified_base 14: mod_base = OTHER; note = 2'-O-methyluridine-3'-phosphate
  modified_base 15: mod_base = OTHER; note = 2'-O-methylguanosine-3'-phosphate
  modified_base 16: mod_base = OTHER; note = 2'-O-methyluridine-3'-phosphate
  modified_base 17: mod_base = OTHER; note = 2'-O-methyladenosine-3'-phosphate
  modified_base 18: mod_base = OTHER; note = 2'-O-methylcytidine-3'-phosphate
  modified_base 19: mod_base = OTHER; note = 2'-O-methyladenosine-3'-phosphate
  modified_base 20: mod_base = OTHER; note = 2'-O-methyluridine-3'-phosphate
  modified_base 21: mod_base = OTHER; note = 2'-O-methyluridine-3'-phosphate N-[tris(GalNAc-alkyl)-amidodecanoyl)]-4-hydroxyprolinol Hyp-(GalNAc-alkyl)3
actatatcagtagtgtacatt

SEQ ID NO: 3693 - RNA, 21 nt, synthetic construct
  source 1..21: mol_type = other RNA; note = Description of Artificial Sequence: Synthetic oligonucleotide
  modified_base 1: mod_base = OTHER; note = 2'-O-methyluridine-3'-phosphorothioate
  modified_base 2: mod_base = OTHER; note = 2'-O-methyladenosine-3'-phosphorothioate
  modified_base 3: mod_base = OTHER; note = 2'-O-methyluridine-3'-phosphate
  modified_base 4: mod_base = OTHER; note = 2'-O-methyladenosine-3'-phosphate
  modified_base 5: mod_base = OTHER; note = 2'-O-methyluridine-3'-phosphate
  modified_base 6: mod_base = OTHER; note = 2'-O-methylcytidine-3'-phosphate
  modified_base 7: mod_base = OTHER; note = 2'-fluoroadenosine-3'-phosphate
  modified_base 8: mod_base = OTHER; note = 2'-O-methylguanosine-3'-phosphate
  modified_base 9: mod_base = OTHER; note = 2'-fluorouridine-3'-phosphate
  modified_base 10: mod_base = OTHER; note = 2'-fluoroadenosine-3'-phosphate
  modified_base 11: mod_base = OTHER; note = 2'-fluoroguanosine-3'-phosphate
  modified_base 12: mod_base = OTHER; note = 2'-O-methyluridine-3'-phosphate
  modified_base 13: mod_base = OTHER; note = 2'-O-methylguanosine-3'-phosphate
  modified_base 14: mod_base = OTHER; note = 2'-O-methyluridine-3'-phosphate
  modified_base 15: mod_base = OTHER; note = 2'-O-methyladenosine-3'-phosphate
  modified_base 16: mod_base = OTHER; note = 2'-O-methylcytidine-3'-phosphate
  modified_base 17: mod_base = OTHER; note = 2'-O-methyladenosine-3'-phosphate
  modified_base 18: mod_base = OTHER; note = 2'-O-methyluridine-3'-phosphate
  modified_base 19: mod_base = OTHER; note = 2'-O-methyluridine-3'-phosphate
  modified_base 20: mod_base = OTHER; note = 2'-O-methyladenosine-3'-phosphate
  modified_base 21: mod_base = OTHER; note = 2'-O-methyladenosine-3'-phosphate N-[tris(GalNAc-alkyl)-amidodecanoyl)]-4-hydroxyprolinol Hyp-(GalNAc-alkyl)3
tatatcagtagtgtacattaa

SEQ ID NO: 3694 - RNA, 21 nt, synthetic construct
  source 1..21: mol_type = other RNA; note = Description of Artificial Sequence: Synthetic oligonucleotide
  modified_base 1: mod_base = OTHER; note = 2'-O-methylguanosine-3'-phosphorothioate
  modified_base 2: mod_base = OTHER; note = 2'-O-methyluridine-3'-phosphorothioate
  modified_base 3: mod_base = OTHER; note = 2'-O-methyladenosine-3'-phosphate
  modified_base 4: mod_base = OTHER; note = 2'-O-methyladenosine-3'-phosphate
  modified_base 5: mod_base = OTHER; note = 2'-O-methyluridine-3'-phosphate
  modified_base 6: mod_base = OTHER; note = 2'-O-methyladenosine-3'-phosphate
  modified_base 7: mod_base = OTHER; note = 2'-fluorouridine-3'-phosphate
  modified_base 8: mod_base = OTHER; note = 2'-O-methyluridine-3'-phosphate
  modified_base 9: mod_base = OTHER; note = 2'-fluorouridine-3'-phosphate
  modified_base 10: mod_base = OTHER; note = 2'-fluorouridine-3'-phosphate
  modified_base 11: mod_base = OTHER; note = 2'-fluoroadenosine-3'-phosphate
  modified_base 12: mod_base = OTHER; note = 2'-O-methyladenosine-3'-phosphate
  modified_base 13: mod_base = OTHER; note = 2'-O-methylguanosine-3'-phosphate
  modified_base 14: mod_base = OTHER; note = 2'-O-methyladenosine-3'-phosphate
  modified_base 15: mod_base = OTHER; note = 2'-O-methyluridine-3'-phosphate
  modified_base 16: mod_base = OTHER; note = 2'-O-methylguanosine-3'-phosphate
  modified_base 17: mod_base = OTHER; note = 2'-O-methylguanosine-3'-phosphate
  modified_base 18: mod_base = OTHER; note = 2'-O-methyladenosine-3'-phosphate
  modified_base 19: mod_base = OTHER; note = 2'-O-methylcytidine-3'-phosphate
  modified_base 20: mod_base = OTHER; note = 2'-O-methyluridine-3'-phosphate
  modified_base 21: mod_base = OTHER; note = 2'-O-methyladenosine-3'-phosphate N-[tris(GalNAc-alkyl)-amidodecanoyl)]-4-hydroxyprolinol Hyp-(GalNAc-alkyl)3
gtaatattttaagatggacta

SEQ ID NO: 3695 - RNA, 21 nt, synthetic construct
  source 1..21: mol_type = other RNA; note = Description of Artificial Sequence: Synthetic oligonucleotide
  modified_base 1: mod_base = OTHER; note = 2'-O-methyluridine-3'-phosphorothioate
  modified_base 2: mod_base = OTHER; note = 2'-O-methyluridine-3'-phosphorothioate
  modified_base 3: mod_base = OTHER; note = 2'-O-methyluridine-3'-phosphate
  modified_base 4: mod_base = OTHER; note = 2'-O-methyluridine-3'-phosphate
  modified_base 5: mod_base = OTHER; note = 2'-O-methyladenosine-3'-phosphate
  modified_base 6: mod_base = OTHER; note = 2'-O-methyladenosine-3'-phosphate
  modified_base 7: mod_base = OTHER; note = 2'-fluoroguanosine-3'-phosphate
  modified_base 8: mod_base = OTHER; note = 2'-O-methyladenosine-3'-phosphate
  modified_base 9: mod_base = OTHER; note = 2'-fluorouridine-3'-phosphate
  modified_base 10: mod_base = OTHER; note = 2'-fluoroguanosine-3'-phosphate
  modified_base 11: mod_base = OTHER; note = 2'-fluoroguanosine-3'-phosphate
  modified_base 12: mod_base = OTHER; note = 2'-O-methyladenosine-3'-phosphate
  modified_base 13: mod_base = OTHER; note = 2'-O-methylcytidine-3'-phosphate
  modified_base 14: mod_base = OTHER; note = 2'-O-methyluridine-3'-phosphate
  modified_base 15: mod_base = OTHER; note = 2'-O-methylguanosine-3'-phosphate
  modified_base 16: mod_base = OTHER; note = 2'-O-methylguanosine-3'-phosphate
  modified_base 17: mod_base = OTHER; note = 2'-O-methylguanosine-3'-phosphate
  modified_base 18: mod_base = OTHER; note = 2'-O-methyladenosine-3'-phosphate
  modified_base 19: mod_base = OTHER; note = 2'-O-methyladenosine-3'-phosphate
  modified_base 20: mod_base = OTHER; note = 2'-O-methyladenosine-3'-phosphate
  modified_base 21: mod_base = OTHER; note = 2'-O-methyladenosine-3'-phosphate N-[tris(GalNAc-alkyl)-amidodecanoyl)]-4-hydroxyprolinol Hyp-(GalNAc-alkyl)3
ttttaagatggactgggaaaa

SEQ ID NO: 3696 - RNA, 21 nt, synthetic construct
  source 1..21: mol_type = other RNA; note = Description of Artificial Sequence: Synthetic oligonucleotide
  modified_base 1: mod_base = OTHER; note = 2'-O-methyluridine-3'-phosphorothioate
  modified_base 2: mod_base = OTHER; note = 2'-O-methyluridine-3'-phosphorothioate
  modified_base 3: mod_base = OTHER; note = 2'-O-methylcytidine-3'-phosphate
  modified_base 4: mod_base = OTHER; note = 2'-O-methyladenosine-3'-phosphate
  modified_base 5: mod_base = OTHER; note = 2'-O-methylcytidine-3'-phosphate
  modified_base 6: mod_base = OTHER; note = 2'-O-methyluridine-3'-phosphate
  modified_base 7: mod_base = OTHER; note = 2'-fluoroguanosine-3'-phosphate
  modified_base 8: mod_base = OTHER; note = 2'-O-methyladenosine-3'-phosphate
  modified_base 9: mod_base = OTHER; note = 2'-fluoroadenosine-3'-phosphate
  modified_base 10: mod_base = OTHER; note = 2'-fluorocytidine-3'-phosphate
  modified_base 11: mod_base = OTHER; note = 2'-fluoroadenosine-3'-phosphate
  modified_base 12: mod_base = OTHER; note = 2'-O-methyluridine-3'-phosphate
  modified_base 13: mod_base = OTHER; note = 2'-O-methylguanosine-3'-phosphate
  modified_base 14: mod_base = OTHER; note = 2'-O-methylcytidine-3'-phosphate
  modified_base 15: mod_base = OTHER; note = 2'-O-methylcytidine-3'-phosphate
  modified_base 16: mod_base = OTHER; note = 2'-O-methyluridine-3'-phosphate
  modified_base 17: mod_base = OTHER; note = 2'-O-methyladenosine-3'-phosphate
  modified_base 18: mod_base = OTHER; note = 2'-O-methylguanosine-3'-phosphate
  modified_base 19: mod_base = OTHER; note = 2'-O-methyluridine-3'-phosphate
  modified_base 20: mod_base = OTHER; note = 2'-O-methylcytidine-3'-phosphate
  modified_base 21: mod_base = OTHER; note = 2'-O-methyladenosine-3'-phosphate N-[tris(GalNAc-alkyl)-amidodecanoyl)]-4-hydroxyprolinol Hyp-(GalNAc-alkyl)3
ttcactgaacatgcctagtca

SEQ ID NO: 3697 - RNA, 21 nt, synthetic construct
  source 1..21: mol_type = other RNA; note = Description of Artificial Sequence: Synthetic oligonucleotide
  modified_base 1: mod_base = OTHER; note = 2'-O-methyladenosine-3'-phosphorothioate
  modified_base 2: mod_base = OTHER; note = 2'-O-methylcytidine-3'-phosphorothioate
  modified_base 3: mod_base = OTHER; note = 2'-O-methylcytidine-3'-phosphate
  modified_base 4: mod_base = OTHER; note = 2'-O-methyladenosine-3'-phosphate
  modified_base 5: mod_base = OTHER; note = 2'-O-methyladenosine-3'-phosphate
  modified_base 6: mod_base = OTHER; note = 2'-O-methylcytidine-3'-phosphate
  modified_base 7: mod_base = OTHER; note = 2'-fluorouridine-3'-phosphate
  modified_base 8: mod_base = OTHER; note = 2'-O-methyladenosine-3'-phosphate
  modified_base 9: mod_base = OTHER; note = 2'-fluorouridine-3'-phosphate
  modified_base 10: mod_base = OTHER; note = 2'-fluorocytidine-3'-phosphate
  modified_base 11: mod_base = OTHER; note = 2'-fluorocytidine-3'-phosphate
  modified_base 12: mod_base = OTHER; note = 2'-O-methyladenosine-3'-phosphate
  modified_base 13: mod_base = OTHER; note = 2'-O-methyladenosine-3'-phosphate
  modified_base 14: mod_base = OTHER; note = 2'-O-methylguanosine-3'-phosphate
  modified_base 15: mod_base = OTHER; note = 2'-O-methyluridine-3'-phosphate
  modified_base 16: mod_base = OTHER; note = 2'-O-methylguanosine-3'-phosphate
  modified_base 17: mod_base = OTHER; note = 2'-O-methyluridine-3'-phosphate
  modified_base 18: mod_base = OTHER; note = 2'-O-methyluridine-3'-phosphate
  modified_base 19: mod_base = OTHER; note = 2'-O-methyladenosine-3'-phosphate
  modified_base 20: mod_base = OTHER; note = 2'-O-methyluridine-3'-phosphate
  modified_base 21: mod_base = OTHER; note = 2'-O-methyladenosine-3'-phosphate N-[tris(GalNAc-alkyl)-amidodecanoyl)]-4-hydroxyprolinol Hyp-(GalNAc-alkyl)3
accaactatccaagtgttata

SEQ ID NO: 3698 - RNA, 21 nt, synthetic construct
  source 1..21: mol_type = other RNA; note = Description of Artificial Sequence: Synthetic oligonucleotide
  modified_base 1: mod_base = OTHER; note = 2'-O-methylcytidine-3'-phosphorothioate
  modified_base 2: mod_base = OTHER; note = 2'-O-methylcytidine-3'-phosphorothioate
  modified_base 3: mod_base = OTHER; note = 2'-O-methyladenosine-3'-phosphate
  modified_base 4: mod_base = OTHER; note = 2'-O-methyladenosine-3'-phosphate
  modified_base 5: mod_base = OTHER; note = 2'-O-methylguanosine-3'-phosphate
  modified_base 6: mod_base = OTHER; note = 2'-O-methyluridine-3'-phosphate
  modified_base 7: mod_base = OTHER; note = 2'-fluoroguanosine-3'-phosphate
  modified_base 8: mod_base = OTHER; note = 2'-O-methyluridine-3'-phosphate
  modified_base 9: mod_base = OTHER; note = 2'-fluorouridine-3'-phosphate
  modified_base 10: mod_base = OTHER; note = 2'-fluoroadenosine-3'-phosphate
  modified_base 11: mod_base = OTHER; note = 2'-fluorouridine-3'-phosphate
  modified_base 12: mod_base = OTHER; note = 2'-O-methyladenosine-3'-phosphate
  modified_base 13: mod_base = OTHER; note = 2'-O-methylcytidine-3'-phosphate
  modified_base 14: mod_base = OTHER; note = 2'-O-methylcytidine-3'-phosphate
  modified_base 15: mod_base = OTHER; note = 2'-O-methyladenosine-3'-phosphate
  modified_base 16: mod_base = OTHER; note = 2'-O-methyladenosine-3'-phosphate
  modified_base 17: mod_base = OTHER; note = 2'-O-methylcytidine-3'-phosphate
  modified_base 18: mod_base = OTHER; note = 2'-O-methyluridine-3'-phosphate
  modified_base 19: mod_base = OTHER; note = 2'-O-methyladenosine-3'-phosphate
  modified_base 20: mod_base = OTHER; note = 2'-O-methyladenosine-3'-phosphate
  modified_base 21: mod_base = OTHER; note = 2'-O-methyladenosine-3'-phosphate N-[tris(GalNAc-alkyl)-amidodecanoyl)]-4-hydroxyprolinol Hyp-(GalNAc-alkyl)3
ccaagtgttataccaactaaa

SEQ ID NO: 3699 - RNA, 21 nt, synthetic construct
  source 1..21: mol_type = other RNA; note = Description of Artificial Sequence: Synthetic oligonucleotide
  modified_base 1: mod_base = OTHER; note = 2'-O-methyladenosine-3'-phosphorothioate
  modified_base 2: mod_base = OTHER; note = 2'-O-methylguanosine-3'-phosphorothioate
  modified_base 3: mod_base = OTHER; note = 2'-O-methyluridine-3'-phosphate
  modified_base 4: mod_base = OTHER; note = 2'-O-methyladenosine-3'-phosphate
  modified_base 5: mod_base = OTHER; note = 2'-O-methyladenosine-3'-phosphate
  modified_base 6: mod_base = OTHER; note = 2'-O-methyluridine-3'-phosphate
  modified_base 7: mod_base = OTHER; note = 2'-fluoroadenosine-3'-phosphate
  modified_base 8: mod_base = OTHER; note = 2'-O-methyluridine-3'-phosphate
  modified_base 9: mod_base = OTHER; note = 2'-fluorouridine-3'-phosphate
  modified_base 10: mod_base = OTHER; note = 2'-fluorouridine-3'-phosphate
  modified_base 11: mod_base = OTHER; note = 2'-fluorouridine-3'-phosphate
  modified_base 12: mod_base = OTHER; note = 2'-O-methyladenosine-3'-phosphate
  modified_base 13: mod_base = OTHER; note = 2'-O-methyladenosine-3'-phosphate
  modified_base 14: mod_base = OTHER; note = 2'-O-methylguanosine-3'-phosphate
  modified_base 15: mod_base = OTHER; note = 2'-O-methyladenosine-3'-phosphate
  modified_base 16: mod_base = OTHER; note = 2'-O-methyluridine-3'-phosphate
  modified_base 17: mod_base = OTHER; note = 2'-O-methylguanosine-3'-phosphate
  modified_base 18: mod_base = OTHER; note = 2'-O-methylguanosine-3'-phosphate
  modified_base 19: mod_base = OTHER; note = 2'-O-methyladenosine-3'-phosphate
  modified_base 20: mod_base = OTHER; note = 2'-O-methylcytidine-3'-phosphate
  modified_base 21: mod_base = OTHER; note = 2'-O-methyluridine-3'-phosphate N-[tris(GalNAc-alkyl)-amidodecanoyl)]-4-hydroxyprolinol Hyp-(GalNAc-alkyl)3
agtaatattttaagatggact

SEQ ID NO: 3700 - RNA, 21 nt, synthetic construct
  source 1..21: mol_type = other RNA; note = Description of Artificial Sequence: Synthetic oligonucleotide
  modified_base 1: mod_base = OTHER; note = 2'-O-methyladenosine-3'-phosphorothioate
  modified_base 2: mod_base = OTHER; note = 2'-O-methyladenosine-3'-phosphorothioate
  modified_base 3: mod_base = OTHER; note = 2'-O-methyladenosine-3'-phosphate
  modified_base 4: mod_base = OTHER; note = 2'-O-methyladenosine-3'-phosphate
  modified_base 5: mod_base = OTHER; note = 2'-O-methyluridine-3'-phosphate
  modified_base 6: mod_base = OTHER; note = 2'-O-methylcytidine-3'-phosphate
  modified_base 7: mod_base = OTHER; note = 2'-fluorocytidine-3'-phosphate
  modified_base 8: mod_base = OTHER; note = 2'-O-methyladenosine-3'-phosphate
  modified_base 9: mod_base = OTHER; note = 2'-fluorocytidine-3'-phosphate
  modified_base 10: mod_base = OTHER; note = 2'-fluoroadenosine-3'-phosphate
  modified_base 11: mod_base = OTHER; note = 2'-fluoroguanosine-3'-phosphate
  modified_base 12: mod_base = OTHER; note = 2'-O-methylcytidine-3'-phosphate
  modified_base 13: mod_base = OTHER; note = 2'-O-methyluridine-3'-phosphate
  modified_base 14: mod_base = OTHER; note = 2'-O-methyladenosine-3'-phosphate
  modified_base 15: mod_base = OTHER; note = 2'-O-methyluridine-3'-phosphate
  modified_base 16: mod_base = OTHER; note = 2'-O-methyladenosine-3'-phosphate
  modified_base 17: mod_base = OTHER; note = 2'-O-methyluridine-3'-phosphate
  modified_base 18: mod_base = OTHER; note = 2'-O-methylcytidine-3'-phosphate
  modified_base 19: mod_base = OTHER; note = 2'-O-methylcytidine-3'-phosphate
  modified_base 20: mod_base = OTHER; note = 2'-O-methyluridine-3'-phosphate
  modified_base 21: mod_base = OTHER; note = 2'-O-methyladenosine-3'-phosphate N-[tris(GalNAc-alkyl)-amidodecanoyl)]-4-hydroxyprolinol Hyp-(GalNAc-alkyl)3
aaaatccacagctatatccta

SEQ ID NO: 3701 - RNA, 21 nt, synthetic construct
  source 1..21: mol_type = other RNA; note = Description of Artificial Sequence: Synthetic oligonucleotide
  modified_base 1: mod_base = OTHER; note = 2'-O-methyluridine-3'-phosphorothioate
  modified_base 2: mod_base = OTHER; note = 2'-O-methylcytidine-3'-phosphorothioate
  modified_base 3: mod_base = OTHER; note = 2'-O-methylcytidine-3'-phosphate
  modified_base 4: mod_base = OTHER; note = 2'-O-methyluridine-3'-phosphate
  modified_base 5: mod_base = OTHER; note = 2'-O-methyluridine-3'-phosphate
  modified_base 6: mod_base = OTHER; note = 2'-O-methylcytidine-3'-phosphate
  modified_base 7: mod_base = OTHER; note = 2'-fluoroadenosine-3'-phosphate
  modified_base 8: mod_base = OTHER; note = 2'-O-methylcytidine-3'-phosphate
  modified_base 9: mod_base = OTHER; note = 2'-fluorouridine-3'-phosphate
  modified_base 10: mod_base = OTHER; note = 2'-fluoroguanosine-3'-phosphate
  modified_base 11: mod_base = OTHER; note = 2'-fluoroadenosine-3'-phosphate
  modified_base 12: mod_base = OTHER; note = 2'-O-methyladenosine-3'-phosphate
  modified_base 13: mod_base = OTHER; note = 2'-O-methylcytidine-3'-phosphate
  modified_base 14: mod_base = OTHER; note = 2'-O-methyladenosine-3'-phosphate
  modified_base 15: mod_base = OTHER; note = 2'-O-methyluridine-3'-phosphate
  modified_base 16: mod_base = OTHER; note = 2'-O-methylguanosine-3'-phosphate
  modified_base 17: mod_base = OTHER; note = 2'-O-methylcytidine-3'-phosphate
  modified_base 18: mod_base = OTHER; note = 2'-O-methylcytidine-3'-phosphate
  modified_base 19: mod_base = OTHER; note = 2'-O-methyluridine-3'-phosphate
  modified_base 20: mod_base = OTHER; note = 2'-O-methyladenosine-3'-phosphate
  modified_base 21: mod_base = OTHER; note = 2'-O-methyladenosine-3'-phosphate N-[tris(GalNAc-alkyl)-amidodecanoyl)]-4-hydroxyprolinol Hyp-(GalNAc-alkyl)3
tccttcactgaacatgcctaa

SEQ ID NO: 3702 - RNA, 21 nt, synthetic construct
  source 1..21: mol_type = other RNA; note = Description of Artificial Sequence: Synthetic oligonucleotide
  modified_base 1: mod_base = OTHER; note = 2'-O-methylcytidine-3'-phosphorothioate
  modified_base 2: mod_base = OTHER; note = 2'-O-methyladenosine-3'-phosphorothioate
  modified_base 3: mod_base = OTHER; note = 2'-O-methylcytidine-3'-phosphate
  modified_base 4: mod_base = OTHER; note = 2'-O-methyluridine-3'-phosphate
  modified_base 5: mod_base = OTHER; note = 2'-O-methylguanosine-3'-phosphate
  modified_base 6: mod_base = OTHER; note = 2'-O-methyladenosine-3'-phosphate
  modified_base 7: mod_base = OTHER; note = 2'-fluoroadenosine-3'-phosphate
  modified_base 8: mod_base = OTHER; note = 2'-O-methylcytidine-3'-phosphate
  modified_base 9: mod_base = OTHER; note = 2'-fluoroadenosine-3'-phosphate
  modified_base 10: mod_base = OTHER; note = 2'-fluorouridine-3'-phosphate
  modified_base 11: mod_base = OTHER; note = 2'-fluoroguanosine-3'-phosphate
  modified_base 12: mod_base = OTHER; note = 2'-O-methylcytidine-3'-phosphate
  modified_base 13: mod_base = OTHER; note = 2'-O-methylcytidine-3'-phosphate
  modified_base 14: mod_base = OTHER; note = 2'-O-methyluridine-3'-phosphate
  modified_base 15: mod_base = OTHER; note = 2'-O-methyladenosine-3'-phosphate
  modified_base 16: mod_base = OTHER; note = 2'-O-methylguanosine-3'-phosphate
  modified_base 17: mod_base = OTHER; note = 2'-O-methyluridine-3'-phosphate
  modified_base 18: mod_base = OTHER; note = 2'-O-methylcytidine-3'-phosphate
  modified_base 19: mod_base = OTHER; note = 2'-O-methylcytidine-3'-phosphate
  modified_base 20: mod_base = OTHER; note = 2'-O-methyladenosine-3'-phosphate
  modified_base 21: mod_base = OTHER; note = 2'-O-methyladenosine-3'-phosphate N-[tris(GalNAc-alkyl)-amidodecanoyl)]-4-hydroxyprolinol Hyp-(GalNAc-alkyl)3
cactgaacatgcctagtccaa

SEQ ID NO: 3703 - RNA, 21 nt, synthetic construct
  source 1..21: mol_type = other RNA; note = Description of Artificial Sequence: Synthetic oligonucleotide
  modified_base 1: mod_base = OTHER; note = 2'-O-methyladenosine-3'-phosphorothioate
  modified_base 2: mod_base = OTHER; note = 2'-O-methyladenosine-3'-phosphorothioate
  modified_base 3: mod_base = OTHER; note = 2'-O-methylguanosine-3'-phosphate
  modified_base 4: mod_base = OTHER; note = 2'-O-methyluridine-3'-phosphate
  modified_base 5: mod_base = OTHER; note = 2'-O-methylguanosine-3'-phosphate
  modified_base 6: mod_base = OTHER; note = 2'-O-methyluridine-3'-phosphate
  modified_base 7: mod_base = OTHER; note = 2'-fluorouridine-3'-phosphate
  modified_base 8: mod_base = OTHER; note = 2'-O-methyladenosine-3'-phosphate
  modified_base 9: mod_base = OTHER; note = 2'-fluorouridine-3'-phosphate
  modified_base 10: mod_base = OTHER; note = 2'-fluoroadenosine-3'-phosphate
  modified_base 11: mod_base = OTHER; note = 2'-fluorocytidine-3'-phosphate
  modified_base 12: mod_base = OTHER; note = 2'-O-methylcytidine-3'-phosphate
  modified_base 13: mod_base = OTHER; note = 2'-O-methyladenosine-3'-phosphate
  modified_base 14: mod_base = OTHER; note = 2'-O-methyladenosine-3'-phosphate
  modified_base 15: mod_base = OTHER; note = 2'-O-methylcytidine-3'-phosphate
  modified_base 16: mod_base = OTHER; note = 2'-O-methyluridine-3'-phosphate
  modified_base 17: mod_base = OTHER; note = 2'-O-methyladenosine-3'-phosphate
  modified_base 18: mod_base = OTHER; note = 2'-O-methyladenosine-3'-phosphate
  modified_base 19: mod_base = OTHER; note = 2'-O-methyladenosine-3'-phosphate
  modified_base 20: mod_base = OTHER; note = 2'-O-methyladenosine-3'-phosphate
  modified_base 21: mod_base = OTHER; note = 2'-O-methylcytidine-3'-phosphate N-[tris(GalNAc-alkyl)-amidodecanoyl)]-4-hydroxyprolinol Hyp-(GalNAc-alkyl)3
aagtgttataccaactaaaac

SEQ ID NO: 3704 - RNA, 21 nt, synthetic construct
  source 1..21: mol_type = other RNA; note = Description of Artificial Sequence: Synthetic oligonucleotide
  modified_base 1: mod_base = OTHER; note = 2'-O-methyluridine-3'-phosphorothioate
  modified_base 2: mod_base = OTHER; note = 2'-O-methyluridine-3'-phosphorothioate
  modified_base 3: mod_base = OTHER; note = 2'-O-methylcytidine-3'-phosphate
  modified_base 4: mod_base = OTHER; note = 2'-O-methylcytidine-3'-phosphate
  modified_base 5: mod_base = OTHER; note = 2'-O-methyladenosine-3'-phosphate
  modified_base 6: mod_base = OTHER; note = 2'-O-methylcytidine-3'-phosphate
  modified_base 7: mod_base = OTHER; note = 2'-fluorocytidine-3'-phosphate
  modified_base 8: mod_base = OTHER; note = 2'-O-methyladenosine-3'-phosphate
  modified_base 9: mod_base = OTHER; note = 2'-fluorouridine-3'-phosphate
  modified_base 10: mod_base = OTHER; note = 2'-fluoroguanosine-3'-phosphate
  modified_base 11: mod_base = OTHER; note = 2'-fluoroadenosine-3'-phosphate
  modified_base 12: mod_base = OTHER; note = 2'-O-methyluridine-3'-phosphate
  modified_base 13: mod_base = OTHER; note = 2'-O-methyluridine-3'-phosphate
  modified_base 14: mod_base = OTHER; note = 2'-O-methyladenosine-3'-phosphate
  modified_base 15: mod_base = OTHER; note = 2'-O-methyladenosine-3'-phosphate
  modified_base 16: mod_base = OTHER; note = 2'-O-methylguanosine-3'-phosphate
  modified_base 17: mod_base = OTHER; note = 2'-O-methylguanosine-3'-phosphate
  modified_base 18: mod_base = OTHER; note = 2'-O-methylguanosine-3'-phosphate
  modified_base 19: mod_base = OTHER; note = 2'-O-methyluridine-3'-phosphate
  modified_base 20: mod_base = OTHER; note = 2'-O-methylcytidine-3'-phosphate
  modified_base 21: mod_base = OTHER; note = 2'-O-methyluridine-3'-phosphate N-[tris(GalNAc-alkyl)-amidodecanoyl)]-4-hydroxyprolinol Hyp-(GalNAc-alkyl)3
ttccaccatgattaagggtct

SEQ ID NO: 3705 - RNA, 21 nt, synthetic construct
  source 1..21: mol_type = other RNA; note = Description of Artificial Sequence: Synthetic oligonucleotide
  modified_base 1: mod_base = OTHER; note = 2'-O-methylguanosine-3'-phosphorothioate
  modified_base 2: mod_base = OTHER; note = 2'-O-methyladenosine-3'-phosphorothioate
  modified_base 3: mod_base = OTHER; note = 2'-O-methyladenosine-3'-phosphate
  modified_base 4: mod_base = OTHER; note = 2'-O-methylcytidine-3'-phosphate
  modified_base 5: mod_base = OTHER; note = 2'-O-methyladenosine-3'-phosphate
  modified_base 6: mod_base = OTHER; note = 2'-O-methyluridine-3'-phosphate
  modified_base 7: mod_base = OTHER; note = 2'-fluoroguanosine-3'-phosphate
  modified_base 8: mod_base = OTHER; note = 2'-O-methylcytidine-3'-phosphate
  modified_base 9: mod_base = OTHER; note = 2'-fluorocytidine-3'-phosphate
  modified_base 10: mod_base = OTHER; note = 2'-fluorouridine-3'-phosphate
  modified_base 11: mod_base = OTHER; note = 2'-fluoroadenosine-3'-phosphate
  modified_base 12: mod_base = OTHER; note = 2'-O-methylguanosine-3'-phosphate
  modified_base 13: mod_base = OTHER; note = 2'-O-methyluridine-3'-phosphate
  modified_base 14: mod_base = OTHER; note = 2'-O-methylcytidine-3'-phosphate
  modified_base 15: mod_base = OTHER; note = 2'-O-methylcytidine-3'-phosphate
  modified_base 16: mod_base = OTHER; note = 2'-O-methyladenosine-3'-phosphate
  modified_base 17: mod_base = OTHER; note = 2'-O-methyladenosine-3'-phosphate
  modified_base 18: mod_base = OTHER; note = 2'-O-methylcytidine-3'-phosphate
  modified_base 19: mod_base = OTHER; note = 2'-O-methyladenosine-3'-phosphate
  modified_base 20: mod_base = OTHER; note = 2'-O-methyluridine-3'-phosphate
  modified_base 21: mod_base = OTHER; note = 2'-O-methyluridine-3'-phosphate N-[tris(GalNAc-alkyl)-amidodecanoyl)]-4-hydroxyprolinol Hyp-(GalNAc-alkyl)3
gaacatgcctagtccaacatt

SEQ ID NO: 3706 - RNA, 21 nt, synthetic construct
  source 1..21: mol_type = other RNA; note = Description of Artificial Sequence: Synthetic oligonucleotide
  modified_base 1: mod_base = OTHER; note = 2'-O-methyladenosine-3'-phosphorothioate
  modified_base 2: mod_base = OTHER; note = 2'-O-methyluridine-3'-phosphorothioate
  modified_base 3: mod_base = OTHER; note = 2'-O-methylcytidine-3'-phosphate
  modified_base 4: mod_base = OTHER; note = 2'-O-methyladenosine-3'-phosphate
  modified_base 5: mod_base = OTHER; note = 2'-O-methylguanosine-3'-phosphate
  modified_base 6: mod_base = OTHER; note = 2'-O-methyluridine-3'-phosphate
  modified_base 7: mod_base = OTHER; note = 2'-fluoroadenosine-3'-phosphate
  modified_base 8: mod_base = OTHER; note = 2'-O-methylguanosine-3'-phosphate
  modified_base 9: mod_base = OTHER; note = 2'-fluorouridine-3'-phosphate
  modified_base 10: mod_base = OTHER; note = 2'-fluoroguanosine-3'-phosphate
  modified_base 11: mod_base = OTHER; note = 2'-fluorouridine-3'-phosphate
  modified_base 12: mod_base = OTHER; note = 2'-O-methyladenosine-3'-phosphate
  modified_base 13: mod_base = OTHER; note = 2'-O-methylcytidine-3'-phosphate
  modified_base 14: mod_base = OTHER; note = 2'-O-methyladenosine-3'-phosphate
  modified_base 15: mod_base = OTHER; note = 2'-O-methyluridine-3'-phosphate
  modified_base 16: mod_base = OTHER; note = 2'-O-methyluridine-3'-phosphate
  modified_base 17: mod_base = OTHER; note = 2'-O-methyladenosine-3'-phosphate
  modified_base 18: mod_base = OTHER; note = 2'-O-methylcytidine-3'-phosphate
  modified_base 19: mod_base = OTHER; note = 2'-O-methylcytidine-3'-phosphate
  modified_base 20: mod_base = OTHER; note = 2'-O-methyladenosine-3'-phosphate
  modified_base 21: mod_base = OTHER; note = 2'-O-methyluridine-3'-phosphate N-[tris(GalNAc-alkyl)-amidodecanoyl)]-4-hydroxyprolinol Hyp-(GalNAc-alkyl)3
atcagtagtgtacattaccat

SEQ ID NO: 3707 - RNA, 21 nt, synthetic construct
  source 1..21: mol_type = other RNA; note = Description of Artificial Sequence: Synthetic oligonucleotide
  modified_base 1: mod_base = OTHER; note = 2'-O-methyladenosine-3'-phosphorothioate
  modified_base 2: mod_base = OTHER; note = 2'-O-methyluridine-3'-phosphorothioate
  modified_base 3: mod_base = OTHER; note = 2'-O-methylcytidine-3'-phosphate
  modified_base 4: mod_base = OTHER; note = 2'-O-methylcytidine-3'-phosphate
  modified_base 5: mod_base = OTHER; note = 2'-O-methyladenosine-3'-phosphate
  modified_base 6: mod_base = OTHER; note = 2'-O-methyladenosine-3'-phosphate
  modified_base 7: mod_base = OTHER; note = 2'-fluoroguanosine-3'-phosphate
  modified_base 8: mod_base = OTHER; note = 2'-O-methyluridine-3'-phosphate
  modified_base 9: mod_base = OTHER; note = 2'-fluoroguanosine-3'-phosphate
  modified_base 10: mod_base = OTHER; note = 2'-fluorouridine-3'-phosphate
  modified_base 11: mod_base = OTHER; note = 2'-fluorouridine-3'-phosphate
  modified_base 12: mod_base = OTHER; note = 2'-O-methyladenosine-3'-phosphate
  modified_base 13: mod_base = OTHER; note = 2'-O-methyluridine-3'-phosphate
  modified_base 14: mod_base = OTHER; note = 2'-O-methyladenosine-3'-phosphate
  modified_base 15: mod_base = OTHER; note = 2'-O-methylcytidine-3'-phosphate
  modified_base 16: mod_base = OTHER; note = 2'-O-methylcytidine-3'-phosphate
  modified_base 17: mod_base = OTHER; note = 2'-O-methyladenosine-3'-phosphate
  modified_base 18: mod_base = OTHER; note = 2'-O-methyladenosine-3'-phosphate
  modified_base 19: mod_base = OTHER; note = 2'-O-methylcytidine-3'-phosphate
  modified_base 20: mod_base = OTHER; note = 2'-O-methyluridine-3'-phosphate
  modified_base 21: mod_base = OTHER; note = 2'-O-methyladenosine-3'-phosphate N-[tris(GalNAc-alkyl)-amidodecanoyl)]-4-hydroxyprolinol Hyp-(GalNAc-alkyl)3
atccaagtgttataccaacta

SEQ ID NO: 3708 - RNA, 21 nt, synthetic construct
  source 1..21: mol_type = other RNA; note = Description of Artificial Sequence: Synthetic oligonucleotide
  modified_base 1: mod_base = OTHER; note = 2'-O-methylcytidine-3'-phosphorothioate
  modified_base 2: mod_base = OTHER; note = 2'-O-methylcytidine-3'-phosphorothioate
  modified_base 3: mod_base = OTHER; note = 2'-O-methyladenosine-3'-phosphate
  modified_base 4: mod_base = OTHER; note = 2'-O-methyladenosine-3'-phosphate
  modified_base 5: mod_base = OTHER; note = 2'-O-methylguanosine-3'-phosphate
  modified_base 6: mod_base = OTHER; note = 2'-O-methyluridine-3'-phosphate
  modified_base 7: mod_base = OTHER; note = 2'-fluorocytidine-3'-phosphate
  modified_base 8: mod_base = OTHER; note = 2'-O-methylcytidine-3'-phosphate
  modified_base 9: mod_base = OTHER; note = 2'-fluoroadenosine-3'-phosphate
  modified_base 10: mod_base = OTHER; note = 2'-fluoroadenosine-3'-phosphate
  modified_base 11: mod_base = OTHER; note = 2'-fluorouridine-3'-phosphate
  modified_base 12: mod_base = OTHER; note = 2'-O-methyladenosine-3'-phosphate
  modified_base 13: mod_base = OTHER; note = 2'-O-methyluridine-3'-phosphate
  modified_base 14: mod_base = OTHER; note = 2'-O-methylguanosine-3'-phosphate
  modified_base 15: mod_base = OTHER; note = 2'-O-methylguanosine-3'-phosphate
  modified_base 16: mod_base = OTHER; note = 2'-O-methylcytidine-3'-phosphate
  modified_base 17: mod_base = OTHER; note = 2'-O-methyladenosine-3'-phosphate
  modified_base 18: mod_base = OTHER; note = 2'-O-methyladenosine-3'-phosphate
  modified_base 19: mod_base = OTHER; note = 2'-O-methylcytidine-3'-phosphate
  modified_base 20: mod_base = OTHER; note = 2'-O-methyluridine-3'-phosphate
  modified_base 21: mod_base = OTHER; note = 2'-O-methyladenosine-3'-phosphate N-[tris(GalNAc-alkyl)-amidodecanoyl)]-4-hydroxyprolinol Hyp-(GalNAc-alkyl)3
ccaagtccaatatggcaacta

SEQ ID NO: 3709 - RNA, 21 nt, synthetic construct
  source 1..21: mol_type = other RNA; note = Description of Artificial Sequence: Synthetic oligonucleotide
  modified_base 1: mod_base = OTHER; note = 2'-O-methylcytidine-3'-phosphorothioate
  modified_base 2: mod_base = OTHER; note = 2'-O-methyladenosine-3'-phosphorothioate
  modified_base 3: mod_base = OTHER; note = 2'-O-methyluridine-3'-phosphate
  modified_base 4: mod_base = OTHER; note = 2'-O-methyluridine-3'-phosphate
  modified_base 5: mod_base = OTHER; note = 2'-O-methyluridine-3'-phosphate
  modified_base 6: mod_base = OTHER; note = 2'-O-methylcytidine-3'-phosphate
  modified_base 7: mod_base = OTHER; note = 2'-fluoroadenosine-3'-phosphate
  modified_base 8: mod_base = OTHER; note = 2'-O-methylcytidine-3'-phosphate
  modified_base 9: mod_base = OTHER; note = 2'-fluorouridine-3'-phosphate
  modified_base 10: mod_base = OTHER; note = 2'-fluoroguanosine-3'-phosphate
  modified_base 11: mod_base = OTHER; note = 2'-fluorouridine-3'-phosphate
  modified_base 12: mod_base = OTHER; note = 2'-O-methylcytidine-3'-phosphate
  modified_base 13: mod_base = OTHER; note = 2'-O-methyluridine-3'-phosphate
  modified_base 14: mod_base = OTHER; note = 2'-O-methyladenosine-3'-phosphate
  modified_base 15: mod_base = OTHER; note = 2'-O-methylguanosine-3'-phosphate
  modified_base 16: mod_base = OTHER; note = 2'-O-methylguanosine-3'-phosphate
  modified_base 17: mod_base = OTHER; note = 2'-O-methylcytidine-3'-phosphate
  modified_base 18: mod_base = OTHER; note = 2'-O-methyluridine-3'-phosphate
  modified_base 19: mod_base = OTHER; note = 2'-O-methyladenosine-3'-phosphate
  modified_base 20: mod_base = OTHER; note = 2'-O-methylcytidine-3'-phosphate
  modified_base 21: mod_base = OTHER; note = 2'-O-methyladenosine-3'-phosphate N-[tris(GalNAc-alkyl)-amidodecanoyl)]-4-hydroxyprolinol Hyp-(GalNAc-alkyl)3
catttcactgtctaggctaca

SEQ ID NO: 3710 - RNA, 21 nt, synthetic construct
  source 1..21: mol_type = other RNA; note = Description of Artificial Sequence: Synthetic oligonucleotide
  modified_base 1: mod_base = OTHER; note = 2'-O-methylcytidine-3'-phosphorothioate
  modified_base 2: mod_base = OTHER; note = 2'-O-methylcytidine-3'-phosphorothioate
  modified_base 3: mod_base = OTHER; note = 2'-O-methyladenosine-3'-phosphate
  modified_base 4: mod_base = OTHER; note = 2'-O-methylcytidine-3'-phosphate
  modified_base 5: mod_base = OTHER; note = 2'-O-methyladenosine-3'-phosphate
  modified_base 6: mod_base = OTHER; note = 2'-O-methylguanosine-3'-phosphate
  modified_base 7: mod_base = OTHER; note = 2'-fluorocytidine-3'-phosphate
  modified_base 8: mod_base = OTHER; note = 2'-O-methyluridine-3'-phosphate
  modified_base 9: mod_base = OTHER; note = 2'-fluoroadenosine-3'-phosphate
  modified_base 10: mod_base = OTHER; note = 2'-fluorouridine-3'-phosphate
  modified_base 11: mod_base = OTHER; note = 2'-fluoroadenosine-3'-phosphate
  modified_base 12: mod_base = OTHER; note = 2'-O-methyluridine-3'-phosphate
  modified_base 13: mod_base = OTHER; note = 2'-O-methylcytidine-3'-phosphate
  modified_base 14: mod_base = OTHER; note = 2'-O-methylcytidine-3'-phosphate
  modified_base 15: mod_base = OTHER; note = 2'-O-methyluridine-3'-phosphate
  modified_base 16: mod_base = OTHER; note = 2'-O-methylguanosine-3'-phosphate
  modified_base 17: mod_base = OTHER; note = 2'-O-methyladenosine-3'-phosphate
  modified_base 18: mod_base = OTHER; note = 2'-O-methyluridine-3'-phosphate
  modified_base 19: mod_base = OTHER; note = 2'-O-methylguanosine-3'-phosphate
  modified_base 20: mod_base = OTHER; note = 2'-O-methylcytidine-3'-phosphate
  modified_base 21: mod_base = OTHER; note = 2'-O-methyluridine-3'-phosphate N-[tris(GalNAc-alkyl)-amidodecanoyl)]-4-hydroxyprolinol Hyp-(GalNAc-alkyl)3
ccacagctatatcctgatgct

SEQ ID NO: 3711 - RNA, 21 nt, synthetic construct
  source 1..21: mol_type = other RNA; note = Description of Artificial Sequence: Synthetic oligonucleotide
  modified_base 1: mod_base = OTHER; note = 2'-O-methylcytidine-3'-phosphorothioate
  modified_base 2: mod_base = OTHER; note = 2'-O-methyluridine-3'-phosphorothioate
  modified_base 3: mod_base = OTHER; note = 2'-O-methyluridine-3'-phosphate
  modified_base 4: mod_base = OTHER; note = 2'-O-methylcytidine-3'-phosphate
  modified_base 5: mod_base = OTHER; note = 2'-O-methyladenosine-3'-phosphate
  modified_base 6: mod_base = OTHER; note = 2'-O-methylcytidine-3'-phosphate
  modified_base 7: mod_base = OTHER; note = 2'-fluorouridine-3'-phosphate
  modified_base 8: mod_base = OTHER; note = 2'-O-methylguanosine-3'-phosphate
  modified_base 9: mod_base = OTHER; note = 2'-fluoroadenosine-3'-phosphate
  modified_base 10: mod_base = OTHER; note = 2'-fluoroadenosine-3'-phosphate
  modified_base 11: mod_base = OTHER; note = 2'-fluorocytidine-3'-phosphate
  modified_base 12: mod_base = OTHER; note = 2'-O-methyladenosine-3'-phosphate
  modified_base 13: mod_base = OTHER; note = 2'-O-methyluridine-3'-phosphate
  modified_base 14: mod_base = OTHER; note = 2'-O-methylguanosine-3'-phosphate
  modified_base 15: mod_base = OTHER; note = 2'-O-methylcytidine-3'-phosphate
  modified_base 16: mod_base = OTHER; note = 2'-O-methylcytidine-3'-phosphate
  modified_base 17: mod_base = OTHER; note = 2'-O-methyluridine-3'-phosphate
  modified_base 18: mod_base = OTHER; note = 2'-O-methyladenosine-3'-phosphate
  modified_base 19: mod_base = OTHER; note = 2'-O-methylguanosine-3'-phosphate
  modified_base 20: mod_base = OTHER; note = 2'-O-methyluridine-3'-phosphate
  modified_base 21: mod_base = OTHER; note = 2'-O-methyladenosine-3'-phosphate N-[tris(GalNAc-alkyl)-amidodecanoyl)]-4-hydroxyprolinol Hyp-(GalNAc-alkyl)3
cttcactgaacatgcctagta

SEQ ID NO: 3712 - RNA, 21 nt, synthetic construct
  source 1..21: mol_type = other RNA; note = Description of Artificial Sequence: Synthetic oligonucleotide
  modified_base 1: mod_base = OTHER; note = 2'-O-methylguanosine-3'-phosphorothioate
  modified_base 2: mod_base = OTHER; note = 2'-O-methyluridine-3'-phosphorothioate
  modified_base 3: mod_base = OTHER; note = 2'-O-methylguanosine-3'-phosphate
  modified_base 4: mod_base = OTHER; note = 2'-O-methylguanosine-3'-phosphate
  modified_base 5: mod_base = OTHER; note = 2'-O-methyluridine-3'-phosphate
  modified_base 6: mod_base = OTHER; note = 2'-O-methyluridine-3'-phosphate
  modified_base 7: mod_base = OTHER; note = 2'-fluoroguanosine-3'-phosphate
  modified_base 8: mod_base = OTHER; note = 2'-O-methyladenosine-3'-phosphate
  modified_base 9: mod_base = OTHER; note = 2'-fluoroguanosine-3'-phosphate
  modified_base 10: mod_base = OTHER; note = 2'-fluoroadenosine-3'-phosphate
  modified_base 11: mod_base = OTHER; note = 2'-fluoroguanosine-3'-phosphate
  modified_base 12: mod_base = OTHER; note = 2'-O-methyluridine-3'-phosphate
  modified_base 13: mod_base = OTHER; note = 2'-O-methylguanosine-3'-phosphate
  modified_base 14: mod_base = OTHER; note = 2'-O-methylcytidine-3'-phosphate
  modified_base 15: mod_base = OTHER; note = 2'-O-methyluridine-3'-phosphate
  modified_base 16: mod_base = OTHER; note = 2'-O-methyluridine-3'-phosphate
  modified_base 17: mod_base = OTHER; note = 2'-O-methyladenosine-3'-phosphate
  modified_base 18: mod_base = OTHER; note = 2'-O-methyluridine-3'-phosphate
  modified_base 19: mod_base = OTHER; note = 2'-O-methylguanosine-3'-phosphate
  modified_base 20: mod_base = OTHER; note = 2'-O-methyladenosine-3'-phosphate
  modified_base 21: mod_base = OTHER; note = 2'-O-methyladenosine-3'-phosphate N-[tris(GalNAc-alkyl)-amidodecanoyl)]-4-hydroxyprolinol Hyp-(GalNAc-alkyl)3
gtggttgagagtgcttatgaa

SEQ ID NO: 3713 - RNA, 21 nt, synthetic construct
  source 1..21: mol_type = other RNA; note = Description of Artificial Sequence: Synthetic oligonucleotide
  modified_base 1: mod_base = OTHER; note = 2'-O-methyladenosine-3'-phosphorothioate
  modified_base 2: mod_base = OTHER; note = 2'-O-methyluridine-3'-phosphorothioate
  modified_base 3: mod_base = OTHER; note = 2'-O-methyladenosine-3'-phosphate
  modified_base 4: mod_base = OTHER; note = 2'-O-methyluridine-3'-phosphate
  modified_base 5: mod_base = OTHER; note = 2'-O-methylcytidine-3'-phosphate
  modified_base 6: mod_base = OTHER; note = 2'-O-methyladenosine-3'-phosphate
  modified_base 7: mod_base = OTHER; note = 2'-fluoroguanosine-3'-phosphate
  modified_base 8: mod_base = OTHER; note = 2'-O-methyluridine-3'-phosphate
  modified_base 9: mod_base = OTHER; note = 2'-fluoroadenosine-3'-phosphate
  modified_base 10: mod_base = OTHER; note = 2'-fluoroguanosine-3'-phosphate
  modified_base 11: mod_base = OTHER; note = 2'-fluorouridine-3'-phosphate
  modified_base 12: mod_base = OTHER; note = 2'-O-methylguanosine-3'-phosphate
  modified_base 13: mod_base = OTHER; note = 2'-O-methyluridine-3'-phosphate
  modified_base 14: mod_base = OTHER; note = 2'-O-methyladenosine-3'-phosphate
  modified_base 15: mod_base = OTHER; note = 2'-O-methylcytidine-3'-phosphate
  modified_base 16: mod_base = OTHER; note = 2'-O-methyladenosine-3'-phosphate
  modified_base 17: mod_base = OTHER; note = 2'-O-methyluridine-3'-phosphate
  modified_base 18: mod_base = OTHER; note = 2'-O-methyluridine-3'-phosphate
  modified_base 19: mod_base = OTHER; note = 2'-O-methyladenosine-3'-phosphate
  modified_base 20: mod_base = OTHER; note = 2'-O-methylcytidine-3'-phosphate
  modified_base 21: mod_base = OTHER; note = 2'-O-methyladenosine-3'-phosphate N-[tris(GalNAc-alkyl)-amidodecanoyl)]-4-hydroxyprolinol Hyp-(GalNAc-alkyl)3
atatcagtagtgtacattaca

SEQ ID NO: 3714 - RNA, 21 nt, synthetic construct
  source 1..21: mol_type = other RNA; note = Description of Artificial Sequence: Synthetic oligonucleotide
  modified_base 1: mod_base = OTHER; note = 2'-O-methylcytidine-3'-phosphorothioate
  modified_base 2: mod_base = OTHER; note = 2'-O-methyladenosine-3'-phosphorothioate
  modified_base 3: mod_base = OTHER; note = 2'-O-methyladenosine-3'-phosphate
  modified_base 4: mod_base = OTHER; note = 2'-O-methylcytidine-3'-phosphate
  modified_base 5: mod_base = OTHER; note = 2'-O-methylcytidine-3'-phosphate
  modified_base 6: mod_base = OTHER; note = 2'-O-methyladenosine-3'-phosphate
  modified_base 7: mod_base = OTHER; note = 2'-fluoroadenosine-3'-phosphate
  modified_base 8: mod_base = OTHER; note = 2'-O-methylcytidine-3'-phosphate
  modified_base 9: mod_base = OTHER; note = 2'-fluorouridine-3'-phosphate
  modified_base 10: mod_base = OTHER; note = 2'-fluoroadenosine-3'-phosphate
  modified_base 11: mod_base = OTHER; note = 2'-fluorouridine-3'-phosphate
  modified_base 12: mod_base = OTHER; note = 2'-O-methylcytidine-3'-phosphate
  modified_base 13: mod_base = OTHER; note = 2'-O-methylcytidine-3'-phosphate
  modified_base 14: mod_base = OTHER; note = 2'-O-methyladenosine-3'-phosphate
  modified_base 15: mod_base = OTHER; note = 2'-O-methyladenosine-3'-phosphate
  modified_base 16: mod_base = OTHER; note = 2'-O-methylguanosine-3'-phosphate
  modified_base 17: mod_base = OTHER; note = 2'-O-methyluridine-3'-phosphate
  modified_base 18: mod_base = OTHER; note = 2'-O-methylguanosine-3'-phosphate
  modified_base 19: mod_base = OTHER; note = 2'-O-methyluridine-3'-phosphate
  modified_base 20: mod_base = OTHER; note = 2'-O-methyluridine-3'-phosphate
  modified_base 21: mod_base = OTHER; note = 2'-O-methyladenosine-3'-phosphate N-[tris(GalNAc-alkyl)-amidodecanoyl)]-4-hydroxyprolinol Hyp-(GalNAc-alkyl)3
caaccaactatccaagtgtta

SEQ ID NO: 3715 - RNA, 21 nt, synthetic construct
  source 1..21: mol_type = other RNA; note = Description of Artificial Sequence: Synthetic oligonucleotide
  modified_base 1: mod_base = OTHER; note = 2'-O-methylguanosine-3'-phosphorothioate
  modified_base 2: mod_base = OTHER; note = 2'-O-methylcytidine-3'-phosphorothioate
  modified_base 3: mod_base = OTHER; note = 2'-O-methyladenosine-3'-phosphate
  modified_base 4: mod_base = OTHER; note = 2'-O-methylguanosine-3'-phosphate
  modified_base 5: mod_base = OTHER; note = 2'-O-methyladenosine-3'-phosphate
  modified_base 6: mod_base = OTHER; note = 2'-O-methyluridine-3'-phosphate
  modified_base 7: mod_base = OTHER; note = 2'-fluorouridine-3'-phosphate
  modified_base 8: mod_base = OTHER; note = 2'-O-methyluridine-3'-phosphate
  modified_base 9: mod_base = OTHER; note = 2'-fluoroguanosine-3'-phosphate
  modified_base 10: mod_base = OTHER; note = 2'-fluoroguanosine-3'-phosphate
  modified_base 11: mod_base = OTHER; note = 2'-fluorocytidine-3'-phosphate
  modified_base 12: mod_base = OTHER; note = 2'-O-methyladenosine-3'-phosphate
  modified_base 13: mod_base = OTHER; note = 2'-O-methylguanosine-3'-phosphate
  modified_base 14: mod_base = OTHER; note = 2'-O-methyladenosine-3'-phosphate
  modified_base 15: mod_base = OTHER; note = 2'-O-methylguanosine-3'-phosphate
  modified_base 16: mod_base = OTHER; note = 2'-O-methyladenosine-3'-phosphate
  modified_base 17: mod_base = OTHER; note = 2'-O-methylguanosine-3'-phosphate
  modified_base 18: mod_base = OTHER; note = 2'-O-methyluridine-3'-phosphate
  modified_base 19: mod_base = OTHER; note = 2'-O-methyladenosine-3'-phosphate
  modified_base 20: mod_base = OTHER; note = 2'-O-methyluridine-3'-phosphate
  modified_base 21: mod_base = OTHER; note = 2'-O-methyladenosine-3'-phosphate N-[tris(GalNAc-alkyl)-amidodecanoyl)]-4-hydroxyprolinol Hyp-(GalNAc-alkyl)3
gcagatttggcagagagtata

SEQ ID NO: 3716 - RNA, 21 nt, synthetic construct
  source 1..21: mol_type = other RNA; note = Description of Artificial Sequence: Synthetic oligonucleotide
  modified_base 1: mod_base = OTHER; note = 2'-O-methylcytidine-3'-phosphorothioate
  modified_base 2: mod_base = OTHER; note = 2'-O-methyluridine-3'-phosphorothioate
  modified_base 3: mod_base = OTHER; note = 2'-O-methylcytidine-3'-phosphate
  modified_base 4: mod_base = OTHER; note = 2'-O-methylcytidine-3'-phosphate
  modified_base 5: mod_base = OTHER; note = 2'-O-methyluridine-3'-phosphate
  modified_base 6: mod_base = OTHER; note = 2'-O-methyluridine-3'-phosphate
  modified_base 7: mod_base = OTHER; note = 2'-fluorocytidine-3'-phosphate
  modified_base 8: mod_base = OTHER; note = 2'-O-methyladenosine-3'-phosphate
  modified_base 9: mod_base = OTHER; note = 2'-fluorocytidine-3'-phosphate
  modified_base 10: mod_base = OTHER; note = 2'-fluorouridine-3'-phosphate
  modified_base 11: mod_base = OTHER; note = 2'-fluoroguanosine-3'-phosphate
  modified_base 12: mod_base = OTHER; note = 2'-O-methyladenosine-3'-phosphate
  modified_base 13: mod_base = OTHER; note = 2'-O-methyladenosine-3'-phosphate
  modified_base 14: mod_base = OTHER; note = 2'-O-methylcytidine-3'-phosphate
  modified_base 15: mod_base = OTHER; note = 2'-O-methyladenosine-3'-phosphate
  modified_base 16: mod_base = OTHER; note = 2'-O-methyluridine-3'-phosphate
  modified_base 17: mod_base = OTHER; note = 2'-O-methylguanosine-3'-phosphate
  modified_base 18: mod_base = OTHER; note = 2'-O-methylcytidine-3'-phosphate
  modified_base 19: mod_base = OTHER; note = 2'-O-methylcytidine-3'-phosphate
  modified_base 20: mod_base = OTHER; note = 2'-O-methyluridine-3'-phosphate
  modified_base 21: mod_base = OTHER; note = 2'-O-methyladenosine-3'-phosphate N-[tris(GalNAc-alkyl)-amidodecanoyl)]-4-hydroxyprolinol Hyp-(GalNAc-alkyl)3
ctccttcactgaacatgccta

SEQ ID NO: 3717 - RNA, 21 nt, synthetic construct
  source 1..21: mol_type = other RNA; note = Description of Artificial Sequence: Synthetic oligonucleotide
  modified_base 1: mod_base = OTHER; note = 2'-O-methylcytidine-3'-phosphorothioate
  modified_base 2: mod_base = OTHER; note = 2'-O-methyladenosine-3'-phosphorothioate
  modified_base 3: mod_base = OTHER; note = 2'-O-methyluridine-3'-phosphate
  modified_base 4: mod_base = OTHER; note = 2'-O-methylguanosine-3'-phosphate
  modified_base 5: mod_base = OTHER; note = 2'-O-methylcytidine-3'-phosphate
  modified_base 6: mod_base = OTHER; note = 2'-O-methylcytidine-3'-phosphate
  modified_base 7: mod_base = OTHER; note = 2'-fluorouridine-3'-phosphate
  modified_base 8: mod_base = OTHER; note = 2'-O-methyladenosine-3'-phosphate
  modified_base 9: mod_base = OTHER; note = 2'-fluoroguanosine-3'-phosphate
  modified_base 10: mod_base = OTHER; note = 2'-fluorouridine-3'-phosphate
  modified_base 11: mod_base = OTHER; note = 2'-fluorocytidine-3'-phosphate
  modified_base 12: mod_base = OTHER; note = 2'-O-methylcytidine-3'-phosphate
  modified_base 13: mod_base = OTHER; note = 2'-O-methyladenosine-3'-phosphate
  modified_base 14: mod_base = OTHER; note = 2'-O-methyladenosine-3'-phosphate
  modified_base 15: mod_base = OTHER; note = 2'-O-methylcytidine-3'-phosphate
  modified_base 16: mod_base = OTHER; note = 2'-O-methyladenosine-3'-phosphate
  modified_base 17: mod_base = OTHER; note = 2'-O-methyluridine-3'-phosphate
  modified_base 18: mod_base = OTHER; note = 2'-O-methyluridine-3'-phosphate
  modified_base 19: mod_base = OTHER; note = 2'-O-methyluridine-3'-phosphate
  modified_base 20: mod_base = OTHER; note = 2'-O-methyluridine-3'-phosphate
  modified_base 21: mod_base = OTHER; note = 2'-O-methyluridine-3'-phosphate N-[tris(GalNAc-alkyl)-amidodecanoyl)]-4-hydroxyprolinol Hyp-(GalNAc-alkyl)3
catgcctagtccaacattttt

SEQ ID NO: 3718 - RNA, 21 nt, synthetic construct
  source 1..21: mol_type = other RNA; note = Description of Artificial Sequence: Synthetic oligonucleotide
  modified_base 1: mod_base = OTHER; note = 2'-O-methyluridine-3'-phosphorothioate
  modified_base 2: mod_base = OTHER; note = 2'-O-methylguanosine-3'-phosphorothioate
  modified_base 3: mod_base = OTHER; note = 2'-O-methylcytidine-3'-phosphate
  modified_base 4: mod_base = OTHER; note = 2'-O-methylcytidine-3'-phosphate
  modified_base 5: mod_base = OTHER; note = 2'-O-methyladenosine-3'-phosphate
  modified_base 6: mod_base = OTHER; note = 2'-O-methyluridine-3'-phosphate
  modified_base 7: mod_base = OTHER; note = 2'-fluorocytidine-3'-phosphate
  modified_base 8: mod_base = OTHER; note = 2'-O-methyladenosine-3'-phosphate
  modified_base 9: mod_base = OTHER; note = 2'-fluoroguanosine-3'-phosphate
  modified_base 10: mod_base = OTHER; note = 2'-fluorouridine-3'-phosphate
  modified_base 11: mod_base = OTHER; note = 2'-fluoroadenosine-3'-phosphate
  modified_base 12: mod_base = OTHER; note = 2'-O-methyluridine-3'-phosphate
  modified_base 13: mod_base = OTHER; note = 2'-O-methylcytidine-3'-phosphate
  modified_base 14: mod_base = OTHER; note = 2'-O-methyluridine-3'-phosphate
  modified_base 15: mod_base = OTHER; note = 2'-O-methyluridine-3'-phosphate
  modified_base 16: mod_base = OTHER; note = 2'-O-methyladenosine-3'-phosphate
  modified_base 17: mod_base = OTHER; note = 2'-O-methyladenosine-3'-phosphate
  modified_base 18: mod_base = OTHER; note = 2'-O-methyluridine-3'-phosphate
  modified_base 19: mod_base = OTHER; note = 2'-O-methylguanosine-3'-phosphate
  modified_base 20: mod_base = OTHER; note = 2'-O-methyladenosine-3'-phosphate
  modified_base 21: mod_base = OTHER; note = 2'-O-methyladenosine-3'-phosphate N-[tris(GalNAc-alkyl)-amidodecanoyl)]-4-hydroxyprolinol Hyp-(GalNAc-alkyl)3
tgccatcagtatcttaatgaa

SEQ ID NO: 3719 - RNA, 21 nt, synthetic construct
  source 1..21: mol_type = other RNA; note = Description of Artificial Sequence: Synthetic oligonucleotide
  modified_base 1: mod_base = OTHER; note = 2'-O-methylguanosine-3'-phosphorothioate
  modified_base 2: mod_base = OTHER; note = 2'-O-methylcytidine-3'-phosphorothioate
  modified_base 3: mod_base = OTHER; note = 2'-O-methylcytidine-3'-phosphate
  modified_base 4: mod_base = OTHER; note = 2'-O-methyladenosine-3'-phosphate
  modified_base 5: mod_base = OTHER; note = 2'-O-methyluridine-3'-phosphate
  modified_base 6: mod_base = OTHER; note = 2'-O-methylcytidine-3'-phosphate
  modified_base 7: mod_base = OTHER; note = 2'-fluoroadenosine-3'-phosphate
  modified_base 8: mod_base = OTHER; note = 2'-O-methylguanosine-3'-phosphate
  modified_base 9: mod_base = OTHER; note = 2'-fluorouridine-3'-phosphate
  modified_base 10: mod_base = OTHER; note = 2'-fluoroadenosine-3'-phosphate
  modified_base 11: mod_base = OTHER; note = 2'-fluorouridine-3'-phosphate
  modified_base 12: mod_base = OTHER; note = 2'-O-methylcytidine-3'-phosphate
  modified_base 13: mod_base = OTHER; note = 2'-O-methyluridine-3'-phosphate
  modified_base 14: mod_base = OTHER; note = 2'-O-methyluridine-3'-phosphate
  modified_base 15: mod_base = OTHER; note = 2'-O-methyladenosine-3'-phosphate
  modified_base 16: mod_base = OTHER; note = 2'-O-methyladenosine-3'-phosphate
  modified_base 17: mod_base = OTHER; note = 2'-O-methyluridine-3'-phosphate
  modified_base 18: mod_base = OTHER; note = 2'-O-methylguanosine-3'-phosphate
  modified_base 19: mod_base = OTHER; note = 2'-O-methyladenosine-3'-phosphate
  modified_base 20: mod_base = OTHER; note = 2'-O-methyladenosine-3'-phosphate
  modified_base 21: mod_base = OTHER; note = 2'-O-methyladenosine-3'-phosphate N-[tris(GalNAc-alkyl)-amidodecanoyl)]-4-hydroxyprolinol Hyp-(GalNAc-alkyl)3
gccatcagtatcttaatgaaa

SEQ ID NO: 3720 - RNA, 21 nt, synthetic construct
  source 1..21: mol_type = other RNA; note = Description of Artificial Sequence: Synthetic oligonucleotide
  modified_base 1: mod_base = OTHER; note = 2'-O-methyluridine-3'-phosphorothioate
  modified_base 2: mod_base = OTHER; note = 2'-O-methyluridine-3'-phosphorothioate
  modified_base 3: mod_base = OTHER; note = 2'-O-methyladenosine-3'-phosphate
  modified_base 4: mod_base = OTHER; note = 2'-O-methylguanosine-3'-phosphate
  modified_base 5: mod_base = OTHER; note = 2'-O-methyladenosine-3'-phosphate
  modified_base 6: mod_base = OTHER; note = 2'-O-methyladenosine-3'-phosphate
  modified_base 7: mod_base = OTHER; note = 2'-fluorocytidine-3'-phosphate
  modified_base 8: mod_base = OTHER; note = 2'-O-methyladenosine-3'-phosphate
  modified_base 9: mod_base = OTHER; note = 2'-fluorocytidine-3'-phosphate
  modified_base 10: mod_base = OTHER; note = 2'-fluorocytidine-3'-phosphate
  modified_base 11: mod_base = OTHER; note = 2'-fluoroadenosine-3'-phosphate
  modified_base 12: mod_base = OTHER; note = 2'-O-methyladenosine-3'-phosphate
  modified_base 13: mod_base = OTHER; note = 2'-O-methyladenosine-3'-phosphate
  modified_base 14: mod_base = OTHER; note = 2'-O-methylguanosine-3'-phosphate
  modified_base 15: mod_base = OTHER; note = 2'-O-methyladenosine-3'-phosphate
  modified_base 16: mod_base = OTHER; note = 2'-O-methyluridine-3'-phosphate
  modified_base 17: mod_base = OTHER; note = 2'-O-methyluridine-3'-phosphate
  modified_base 18: mod_base = OTHER; note = 2'-O-methylguanosine-3'-phosphate
  modified_base 19: mod_base = OTHER; note = 2'-O-methyluridine-3'-phosphate
  modified_base 20: mod_base = OTHER; note = 2'-O-methylcytidine-3'-phosphate
  modified_base 21: mod_base = OTHER; note = 2'-O-methyluridine-3'-phosphate N-[tris(GalNAc-alkyl)-amidodecanoyl)]-4-hydroxyprolinol Hyp-(GalNAc-alkyl)3
ttagaacaccaaagattgtct

SEQ ID NO: 3721 - RNA, 21 nt, synthetic construct
  source 1..21: mol_type = other RNA; note = Description of Artificial Sequence: Synthetic oligonucleotide
  modified_base 1: mod_base = OTHER; note = 2'-O-methyladenosine-3'-phosphorothioate
  modified_base 2: mod_base = OTHER; note = 2'-O-methyluridine-3'-phosphorothioate
  modified_base 3: mod_base = OTHER; note = 2'-O-methylcytidine-3'-phosphate
  modified_base 4: mod_base = OTHER; note = 2'-O-methyladenosine-3'-phosphate
  modified_base 5: mod_base = OTHER; note = 2'-O-methyluridine-3'-phosphate
  modified_base 6: mod_base = OTHER; note = 2'-O-methyluridine-3'-phosphate
  modified_base 7: mod_base = OTHER; note = 2'-fluorouridine-3'-phosphate
  modified_base 8: mod_base = OTHER; note = 2'-O-methylcytidine-3'-phosphate
  modified_base 9: mod_base = OTHER; note = 2'-fluoroadenosine-3'-phosphate
  modified_base 10: mod_base = OTHER; note = 2'-fluorocytidine-3'-phosphate
  modified_base 11: mod_base = OTHER; note = 2'-fluorouridine-3'-phosphate
  modified_base 12: mod_base = OTHER; note = 2'-O-methylguanosine-3'-phosphate
  modified_base 13: mod_base = OTHER; note = 2'-O-methyluridine-3'-phosphate
  modified_base 14: mod_base = OTHER; note = 2'-O-methylcytidine-3'-phosphate
  modified_base 15: mod_base = OTHER; note = 2'-O-methyluridine-3'-phosphate
  modified_base 16: mod_base = OTHER; note = 2'-O-methyladenosine-3'-phosphate
  modified_base 17: mod_base = OTHER; note = 2'-O-methylguanosine-3'-phosphate
  modified_base 18: mod_base = OTHER; note = 2'-O-methylguanosine-3'-phosphate
  modified_base 19: mod_base = OTHER; note = 2'-O-methylcytidine-3'-phosphate
  modified_base 20: mod_base = OTHER; note = 2'-O-methyluridine-3'-phosphate
  modified_base 21: mod_base = OTHER; note = 2'-O-methyladenosine-3'-phosphate N-[tris(GalNAc-alkyl)-amidodecanoyl)]-4-hydroxyprolinol Hyp-(GalNAc-alkyl)3
atcatttcactgtctaggcta

SEQ ID NO: 3722 - RNA, 21 nt, synthetic construct
  source 1..21: mol_type = other RNA; note = Description of Artificial Sequence: Synthetic oligonucleotide
  modified_base 1: mod_base = OTHER; note = 2'-O-methyluridine-3'-phosphorothioate
  modified_base 2: mod_base = OTHER; note = 2'-O-methylcytidine-3'-phosphorothioate
  modified_base 3: mod_base = OTHER; note = 2'-O-methyladenosine-3'-phosphate
  modified_base 4: mod_base = OTHER; note = 2'-O-methylcytidine-3'-phosphate
  modified_base 5: mod_base = OTHER; note = 2'-O-methyluridine-3'-phosphate
  modified_base 6: mod_base = OTHER; note = 2'-O-methylguanosine-3'-phosphate
  modified_base 7: mod_base = OTHER; note = 2'-fluorouridine-3'-phosphate
  modified_base 8: mod_base = OTHER; note = 2'-O-methylcytidine-3'-phosphate
  modified_base 9: mod_base = OTHER; note = 2'-fluorouridine-3'-phosphate
  modified_base 10: mod_base = OTHER; note = 2'-fluoroadenosine-3'-phosphate
  modified_base 11: mod_base = OTHER; note = 2'-fluoroguanosine-3'-phosphate
  modified_base 12: mod_base = OTHER; note = 2'-O-methylguanosine-3'-phosphate
  modified_base 13: mod_base = OTHER; note = 2'-O-methylcytidine-3'-phosphate
  modified_base 14: mod_base = OTHER; note = 2'-O-methyluridine-3'-phosphate
  modified_base 15: mod_base = OTHER; note = 2'-O-methyladenosine-3'-phosphate
  modified_base 16: mod_base = OTHER; note = 2'-O-methylcytidine-3'-phosphate
  modified_base 17: mod_base = OTHER; note = 2'-O-methyladenosine-3'-phosphate
  modified_base 18: mod_base = OTHER; note = 2'-O-methyladenosine-3'-phosphate
  modified_base 19: mod_base = OTHER; note = 2'-O-methylcytidine-3'-phosphate
  modified_base 20: mod_base = OTHER; note = 2'-O-methyladenosine-3'-phosphate
  modified_base 21: mod_base = OTHER; note = 2'-O-methyladenosine-3'-phosphate N-[tris(GalNAc-alkyl)-amidodecanoyl)]-4-hydroxyprolinol Hyp-(GalNAc-alkyl)3
tcactgtctaggctacaacaa

SEQ ID NO: 3723 - RNA, 21 nt, synthetic construct
  source 1..21: mol_type = other RNA; note = Description of Artificial Sequence: Synthetic oligonucleotide
  modified_base 1: mod_base = OTHER; note = 2'-O-methylcytidine-3'-phosphorothioate
  modified_base 2: mod_base = OTHER; note = 2'-O-methyladenosine-3'-phosphorothioate
  modified_base 3: mod_base = OTHER; note = 2'-O-methyladenosine-3'-phosphate
  modified_base 4: mod_base = OTHER; note = 2'-O-methylcytidine-3'-phosphate
  modified_base 5: mod_base = OTHER; note = 2'-O-methyluridine-3'-phosphate
  modified_base 6: mod_base = OTHER; note = 2'-O-methyladenosine-3'-phosphate
  modified_base 7: mod_base = OTHER; note = 2'-fluorouridine-3'-phosphate
  modified_base 8: mod_base = OTHER; note = 2'-O-methylcytidine-3'-phosphate
  modified_base 9: mod_base = OTHER; note = 2'-fluorocytidine-3'-phosphate
  modified_base 10: mod_base = OTHER; note = 2'-fluoroadenosine-3'-phosphate
  modified_base 11: mod_base = OTHER; note = 2'-fluoroadenosine-3'-phosphate
  modified_base 12: mod_base = OTHER; note = 2'-O-methylguanosine-3'-phosphate
  modified_base 13: mod_base = OTHER; note = 2'-O-methyluridine-3'-phosphate
  modified_base 14: mod_base = OTHER; note = 2'-O-methylguanosine-3'-phosphate
  modified_base 15: mod_base = OTHER; note = 2'-O-methyluridine-3'-phosphate
  modified_base 16: mod_base = OTHER; note = 2'-O-methyluridine-3'-phosphate
  modified_base 17: mod_base = OTHER; note = 2'-O-methyladenosine-3'-phosphate
  modified_base 18: mod_base = OTHER; note = 2'-O-methyluridine-3'-phosphate
  modified_base 19: mod_base = OTHER; note = 2'-O-methyladenosine-3'-phosphate
  modified_base 20: mod_base = OTHER; note = 2'-O-methylcytidine-3'-phosphate
  modified_base 21: mod_base = OTHER; note = 2'-O-methyladenosine-3'-phosphate N-[tris(GalNAc-alkyl)-amidodecanoyl)]-4-hydroxyprolinol Hyp-(GalNAc-alkyl)3
caactatccaagtgttataca

SEQ ID NO: 3724 - RNA, 21 nt, synthetic construct
  source 1..21: mol_type = other RNA; note = Description of Artificial Sequence: Synthetic oligonucleotide
  modified_base 1: mod_base = OTHER; note = 2'-O-methyluridine-3'-phosphorothioate
  modified_base 2: mod_base = OTHER; note = 2'-O-methyluridine-3'-phosphorothioate
  modified_base 3: mod_base = OTHER; note = 2'-O-methylguanosine-3'-phosphate
  modified_base 4: mod_base = OTHER; note = 2'-O-methylguanosine-3'-phosphate
  modified_base 5: mod_base = OTHER; note = 2'-O-methyluridine-3'-phosphate
  modified_base 6: mod_base = OTHER; note = 2'-O-methyluridine-3'-phosphate
  modified_base 7: mod_base = OTHER; note = 2'-fluorocytidine-3'-phosphate
  modified_base 8: mod_base = OTHER; note = 2'-O-methylcytidine-3'-phosphate
  modified_base 9: mod_base = OTHER; note = 2'-fluoroadenosine-3'-phosphate
  modified_base 10: mod_base = OTHER; note = 2'-fluoroadenosine-3'-phosphate
  modified_base 11: mod_base = OTHER; note = 2'-fluoroguanosine-3'-phosphate
  modified_base 12: mod_base = OTHER; note = 2'-O-methyluridine-3'-phosphate
  modified_base 13: mod_base = OTHER; note = 2'-O-methylcytidine-3'-phosphate
  modified_base 14: mod_base = OTHER; note = 2'-O-methylcytidine-3'-phosphate
  modified_base 15: mod_base = OTHER; note = 2'-O-methyladenosine-3'-phosphate
  modified_base 16: mod_base = OTHER; note = 2'-O-methyladenosine-3'-phosphate
  modified_base 17: mod_base = OTHER; note = 2'-O-methyluridine-3'-phosphate
  modified_base 18: mod_base = OTHER; note = 2'-O-methyladenosine-3'-phosphate
  modified_base 19: mod_base = OTHER; note = 2'-O-methyluridine-3'-phosphate
  modified_base 20: mod_base = OTHER; note = 2'-O-methylguanosine-3'-phosphate
  modified_base 21: mod_base = OTHER; note = 2'-O-methyladenosine-3'-phosphate N-[tris(GalNAc-alkyl)-amidodecanoyl)]-4-hydroxyprolinol Hyp-(GalNAc-alkyl)3
ttggttccaagtccaatatga

SEQ ID NO: 3725 - RNA, 21 nt, synthetic construct
  source 1..21: mol_type = other RNA; note = Description of Artificial Sequence: Synthetic oligonucleotide
  modified_base 1: mod_base = OTHER; note = 2'-O-methyluridine-3'-phosphorothioate
  modified_base 2: mod_base = OTHER; note = 2'-O-methylguanosine-3'-phosphorothioate
  modified_base 3: mod_base = OTHER; note = 2'-O-methylcytidine-3'-phosphate
  modified_base 4: mod_base = OTHER; note = 2'-O-methyluridine-3'-phosphate
  modified_base 5: mod_base = OTHER; note = 2'-O-methyluridine-3'-phosphate
  modified_base 6: mod_base = OTHER; note = 2'-O-methyladenosine-3'-phosphate
  modified_base 7: mod_base = OTHER; note = 2'-fluorouridine-3'-phosphate
  modified_base 8: mod_base = OTHER; note = 2'-O-methylguanosine-3'-phosphate
  modified_base 9: mod_base = OTHER; note = 2'-fluoroadenosine-3'-phosphate
  modified_base 10: mod_base = OTHER; note = 2'-fluoroguanosine-3'-phosphate
  modified_base 11: mod_base = OTHER; note = 2'-fluoroguanosine-3'-phosphate
  modified_base 12: mod_base = OTHER; note = 2'-O-methyluridine-3'-phosphate
  modified_base 13: mod_base = OTHER; note = 2'-O-methylguanosine-3'-phosphate
  modified_base 14: mod_base = OTHER; note = 2'-O-methyladenosine-3'-phosphate
  modified_base 15: mod_base = OTHER; note = 2'-O-methyluridine-3'-phosphate
  modified_base 16: mod_base = OTHER; note = 2'-O-methylcytidine-3'-phosphate
  modified_base 17: mod_base = OTHER; note = 2'-O-methyladenosine-3'-phosphate
  modified_base 18: mod_base = OTHER; note = 2'-O-methyladenosine-3'-phosphate
  modified_base 19: mod_base = OTHER; note = 2'-O-methyladenosine-3'-phosphate
  modified_base 20: mod_base = OTHER; note = 2'-O-methylcytidine-3'-phosphate
  modified_base 21: mod_base = OTHER; note = 2'-O-methyluridine-3'-phosphate N-[tris(GalNAc-alkyl)-amidodecanoyl)]-4-hydroxyprolinol Hyp-(GalNAc-alkyl)3
tgcttatgaggtgatcaaact

SEQ ID NO: 3726 - RNA, 21 nt, synthetic construct
  source 1..21: mol_type = other RNA; note = Description of Artificial Sequence: Synthetic oligonucleotide
  modified_base 1: mod_base = OTHER; note = 2'-O-methyluridine-3'-phosphorothioate
  modified_base 2: mod_base = OTHER; note = 2'-O-methylcytidine-3'-phosphorothioate
  modified_base 3: mod_base = OTHER; note = 2'-O-methyluridine-3'-phosphate
  modified_base 4: mod_base = OTHER; note = 2'-O-methylcytidine-3'-phosphate
  modified_base 5: mod_base = OTHER; note = 2'-O-methyladenosine-3'-phosphate
  modified_base 6: mod_base = OTHER; note = 2'-O-methylguanosine-3'-phosphate
  modified_base 7: mod_base = OTHER; note = 2'-fluoroadenosine-3'-phosphate
  modified_base 8: mod_base = OTHER; note = 2'-O-methylcytidine-3'-phosphate
  modified_base 9: mod_base = OTHER; note = 2'-fluorocytidine-3'-phosphate
  modified_base 10: mod_base = OTHER; note = 2'-fluorouridine-3'-phosphate
  modified_base 11: mod_base = OTHER; note = 2'-fluorouridine-3'-phosphate
  modified_base 12: mod_base = OTHER; note = 2'-O-methylguanosine-3'-phosphate
  modified_base 13: mod_base = OTHER; note = 2'-O-methyluridine-3'-phosphate
  modified_base 14: mod_base = OTHER; note = 2'-O-methylguanosine-3'-phosphate
  modified_base 15: mod_base = OTHER; note = 2'-O-methyladenosine-3'-phosphate
  modified_base 16: mod_base = OTHER; note = 2'-O-methyladenosine-3'-phosphate
  modified_base 17: mod_base = OTHER; note = 2'-O-methylguanosine-3'-phosphate
  modified_base 18: mod_base = OTHER; note = 2'-O-methylguanosine-3'-phosphate
  modified_base 19: mod_base = OTHER; note = 2'-O-methyluridine-3'-phosphate
  modified_base 20: mod_base = OTHER; note = 2'-O-methylguanosine-3'-phosphate
  modified_base 21: mod_base = OTHER; note = 2'-O-methyladenosine-3'-phosphate N-[tris(GalNAc-alkyl)-amidodecanoyl)]-4-hydroxyprolinol Hyp-(GalNAc-alkyl)3
tctcagaccttgtgaaggtga

SEQ ID NO: 3727 - RNA, 21 nt, synthetic construct
  source 1..21: mol_type = other RNA; note = Description of Artificial Sequence: Synthetic oligonucleotide
  modified_base 1: mod_base = OTHER; note = 2'-O-methyluridine-3'-phosphorothioate
  modified_base 2: mod_base = OTHER; note = 2'-O-methyladenosine-3'-phosphorothioate
  modified_base 3: mod_base = OTHER; note = 2'-O-methyladenosine-3'-phosphate
  modified_base 4: mod_base = OTHER; note = 2'-O-methyladenosine-3'-phosphate
  modified_base 5: mod_base = OTHER; note = 2'-O-methyladenosine-3'-phosphate
  modified_base 6: mod_base = OTHER; note = 2'-O-methyluridine-3'-phosphate
  modified_base 7: mod_base = OTHER; note = 2'-fluorocytidine-3'-phosphate
  modified_base 8: mod_base = OTHER; note = 2'-O-methylcytidine-3'-phosphate
  modified_base 9: mod_base = OTHER; note = 2'-fluoroadenosine-3'-phosphate
  modified_base 10: mod_base = OTHER; note = 2'-fluorocytidine-3'-phosphate
  modified_base 11: mod_base = OTHER; note = 2'-fluoroadenosine-3'-phosphate
  modified_base 12: mod_base = OTHER; note = 2'-O-methylguanosine-3'-phosphate
  modified_base 13: mod_base = OTHER; note = 2'-O-methylcytidine-3'-phosphate
  modified_base 14: mod_base = OTHER; note = 2'-O-methyluridine-3'-phosphate
  modified_base 15: mod_base = OTHER; note = 2'-O-methyladenosine-3'-phosphate
  modified_base 16: mod_base = OTHER; note = 2'-O-methyluridine-3'-phosphate
  modified_base 17: mod_base = OTHER; note = 2'-O-methyladenosine-3'-phosphate
  modified_base 18: mod_base = OTHER; note = 2'-O-methyluridine-3'-phosphate
  modified_base 19: mod_base = OTHER; note = 2'-O-methylcytidine-3'-phosphate
  modified_base 20: mod_base = OTHER; note = 2'-O-methylcytidine-3'-phosphate
  modified_base 21: mod_base = OTHER; note = 2'-O-methyluridine-3'-phosphate N-[tris(GalNAc-alkyl)-amidodecanoyl)]-4-hydroxyprolinol Hyp-(GalNAc-alkyl)3
taaaatccacagctatatcct

SEQ ID NO: 3728 - RNA, 21 nt, synthetic construct
  source 1..21: mol_type = other RNA; note = Description of Artificial Sequence: Synthetic oligonucleotide
  modified_base 1: mod_base = OTHER; note = 2'-O-methylcytidine-3'-phosphorothioate
  modified_base 2: mod_base = OTHER; note = 2'-O-methylcytidine-3'-phosphorothioate
  modified_base 3: mod_base = OTHER; note = 2'-O-methyluridine-3'-phosphate
  modified_base 4: mod_base = OTHER; note = 2'-O-methyluridine-3'-phosphate
  modified_base 5: mod_base = OTHER; note = 2'-O-methylcytidine-3'-phosphate
  modified_base 6: mod_base = OTHER; note = 2'-O-methyladenosine-3'-phosphate
  modified_base 7: mod_base = OTHER; note = 2'-fluorocytidine-3'-phosphate
  modified_base 8: mod_base = OTHER; note = 2'-O-methyluridine-3'-phosphate
  modified_base 9: mod_base = OTHER; note = 2'-fluoroguanosine-3'-phosphate
  modified_base 10: mod_base = OTHER; note = 2'-fluoroadenosine-3'-phosphate
  modified_base 11: mod_base = OTHER; note = 2'-fluoroadenosine-3'-phosphate
  modified_base 12: mod_base = OTHER; note = 2'-O-methylcytidine-3'-phosphate
  modified_base 13: mod_base = OTHER; note = 2'-O-methyladenosine-3'-phosphate
  modified_base 14: mod_base = OTHER; note = 2'-O-methyluridine-3'-phosphate
  modified_base 15: mod_base = OTHER; note = 2'-O-methylguanosine-3'-phosphate
  modified_base 16: mod_base = OTHER; note = 2'-O-methylcytidine-3'-phosphate
  modified_base 17: mod_base = OTHER; note = 2'-O-methylcytidine-3'-phosphate
  modified_base 18: mod_base = OTHER; note = 2'-O-methyluridine-3'-phosphate
  modified_base 19: mod_base = OTHER; note = 2'-O-methyladenosine-3'-phosphate
  modified_base 20: mod_base = OTHER; note = 2'-O-methylguanosine-3'-phosphate
  modified_base 21: mod_base = OTHER; note = 2'-O-methyluridine-3'-phosphate N-[tris(GalNAc-alkyl)-amidodecanoyl)]-4-hydroxyprolinol Hyp-(GalNAc-alkyl)3
ccttcactgaacatgcctagt

SEQ ID NO: 3729 - RNA, 21 nt, synthetic construct
  source 1..21: mol_type = other RNA; note = Description of Artificial Sequence: Synthetic oligonucleotide
  modified_base 1: mod_base = OTHER; note = 2'-O-methylguanosine-3'-phosphorothioate
  modified_base 2: mod_base = OTHER; note = 2'-O-methylguanosine-3'-phosphorothioate
  modified_base 3: mod_base = OTHER; note = 2'-O-methylguanosine-3'-phosphate
  modified_base 4: mod_base = OTHER; note = 2'-O-methyladenosine-3'-phosphate
  modified_base 5: mod_base = OTHER; note = 2'-O-methyluridine-3'-phosphate
  modified_base 6: mod_base = OTHER; note = 2'-O-methylcytidine-3'-phosphate
  modified_base 7: mod_base = OTHER; note = 2'-fluorocytidine-3'-phosphate
  modified_base 8: mod_base = OTHER; note = 2'-O-methyladenosine-3'-phosphate
  modified_base 9: mod_base = OTHER; note = 2'-fluoroguanosine-3'-phosphate
  modified_base 10: mod_base = OTHER; note = 2'-fluorouridine-3'-phosphate
  modified_base 11: mod_base = OTHER; note = 2'-fluoroguanosine-3'-phosphate
  modified_base 12: mod_base = OTHER; note = 2'-O-methyluridine-3'-phosphate
  modified_base 13: mod_base = OTHER; note = 2'-O-methyladenosine-3'-phosphate
  modified_base 14: mod_base = OTHER; note = 2'-O-methyluridine-3'-phosphate
  modified_base 15: mod_base = OTHER; note = 2'-O-methyladenosine-3'-phosphate
  modified_base 16: mod_base = OTHER; note = 2'-O-methyladenosine-3'-phosphate
  modified_base 17: mod_base = OTHER; note = 2'-O-methyladenosine-3'-phosphate
  modified_base 18: mod_base = OTHER; note = 2'-O-methyluridine-3'-phosphate
  modified_base 19: mod_base = OTHER; note = 2'-O-methylcytidine-3'-phosphate
  modified_base 20: mod_base = OTHER; note = 2'-O-methylcytidine-3'-phosphate
  modified_base 21: mod_base = OTHER; note = 2'-O-methyladenosine-3'-phosphate N-[tris(GalNAc-alkyl)-amidodecanoyl)]-4-hydroxyprolinol Hyp-(GalNAc-alkyl)3
gggatccagtgtataaatcca

SEQ ID NO: 3730 - RNA, 21 nt, synthetic construct
  source 1..21: mol_type = other RNA; note = Description of Artificial Sequence: Synthetic oligonucleotide
  modified_base 1: mod_base = OTHER; note = 2'-O-methylcytidine-3'-phosphorothioate
  modified_base 2: mod_base = OTHER; note = 2'-O-methyladenosine-3'-phosphorothioate
  modified_base 3: mod_base = OTHER; note = 2'-O-methyladenosine-3'-phosphate
  modified_base 4: mod_base = OTHER; note = 2'-O-methyluridine-3'-phosphate
  modified_base 5: mod_base = OTHER; note = 2'-O-methyladenosine-3'-phosphate
  modified_base 6: mod_base = OTHER; note = 2'-O-methyladenosine-3'-phosphate
  modified_base 7: mod_base = OTHER; note = 2'-fluoroadenosine-3'-phosphate
  modified_base 8: mod_base = OTHER; note = 2'-O-methylcytidine-3'-phosphate
  modified_base 9: mod_base = OTHER; note = 2'-fluorocytidine-3'-phosphate
  modified_base 10: mod_base = OTHER; note = 2'-fluorouridine-3'-phosphate
  modified_base 11: mod_base = OTHER; note = 2'-fluorouridine-3'-phosphate
  modified_base 12: mod_base = OTHER; note = 2'-O-methylguanosine-3'-phosphate
  modified_base 13: mod_base = OTHER; note = 2'-O-methyladenosine-3'-phosphate
  modified_base 14: mod_base = OTHER; note = 2'-O-methyladenosine-3'-phosphate
  modified_base 15: mod_base = OTHER; note = 2'-O-methylcytidine-3'-phosphate
  modified_base 16: mod_base = OTHER; note = 2'-O-methyladenosine-3'-phosphate
  modified_base 17: mod_base = OTHER; note = 2'-O-methylguanosine-3'-phosphate
  modified_base 18: mod_base = OTHER; note = 2'-O-methyluridine-3'-phosphate
  modified_base 19: mod_base = OTHER; note = 2'-O-methylguanosine-3'-phosphate
  modified_base 20: mod_base = OTHER; note = 2'-O-methyladenosine-3'-phosphate
  modified_base 21: mod_base = OTHER; note = 2'-O-methyladenosine-3'-phosphate N-[tris(GalNAc-alkyl)-amidodecanoyl)]-4-hydroxyprolinol Hyp-(GalNAc-alkyl)3
caataaaccttgaacagtgaa

SEQ ID NO: 3731 - RNA, 21 nt, synthetic construct
  source 1..21: mol_type = other RNA; note = Description of Artificial Sequence: Synthetic oligonucleotide
  modified_base 1: mod_base = OTHER; note = 2'-O-methylguanosine-3'-phosphorothioate
  modified_base 2: mod_base = OTHER; note = 2'-O-methylguanosine-3'-phosphorothioate
  modified_base 3: mod_base = OTHER; note = 2'-O-methylcytidine-3'-phosphate
  modified_base 4: mod_base = OTHER; note = 2'-O-methylcytidine-3'-phosphate
  modified_base 5: mod_base = OTHER; note = 2'-O-methyluridine-3'-phosphate
  modified_base 6: mod_base = OTHER; note = 2'-O-methylguanosine-3'-phosphate
  modified_base 7: mod_base = OTHER; note = 2'-fluorouridine-3'-phosphate
  modified_base 8: mod_base = OTHER; note = 2'-O-methylguanosine-3'-phosphate
  modified_base 9: mod_base = OTHER; note = 2'-fluorocytidine-3'-phosphate
  modified_base 10: mod_base = OTHER; note = 2'-fluorocytidine-3'-phosphate
  modified_base 11: mod_base = OTHER; note = 2'-fluoroadenosine-3'-phosphate
  modified_base 12: mod_base = OTHER; note = 2'-O-methyluridine-3'-phosphate
  modified_base 13: mod_base = OTHER; note = 2'-O-methylcytidine-3'-phosphate
  modified_base 14: mod_base = OTHER; note = 2'-O-methyladenosine-3'-phosphate
  modified_base 15: mod_base = OTHER; note = 2'-O-methylguanosine-3'-phosphate
  modified_base 16: mod_base = OTHER; note = 2'-O-methyluridine-3'-phosphate
  modified_base 17: mod_base = OTHER; note = 2'-O-methyladenosine-3'-phosphate
  modified_base 18: mod_base = OTHER; note = 2'-O-methyluridine-3'-phosphate
  modified_base 19: mod_base = OTHER; note = 2'-O-methylcytidine-3'-phosphate
  modified_base 20: mod_base = OTHER; note = 2'-O-methyluridine-3'-phosphate
  modified_base 21: mod_base = OTHER; note = 2'-O-methyluridine-3'-phosphate N-[tris(GalNAc-alkyl)-amidodecanoyl)]-4-hydroxyprolinol Hyp-(GalNAc-alkyl)3
ggcctgtgccatcagtatctt

SEQ ID NO: 3732 - RNA, 21 nt, synthetic construct
  source 1..21: mol_type = other RNA; note = Description of Artificial Sequence: Synthetic oligonucleotide
  modified_base 1: mod_base = OTHER; note = 2'-O-methyluridine-3'-phosphorothioate
  modified_base 2: mod_base = OTHER; note = 2'-O-methyluridine-3'-phosphorothioate
  modified_base 3: mod_base = OTHER; note = 2'-O-methylguanosine-3'-phosphate
  modified_base 4: mod_base = OTHER; note = 2'-O-methyluridine-3'-phosphate
  modified_base 5: mod_base = OTHER; note = 2'-O-methyluridine-3'-phosphate
  modified_base 6: mod_base = OTHER; note = 2'-O-methylguanosine-3'-phosphate
  modified_base 7: mod_base = OTHER; note = 2'-fluoroadenosine-3'-phosphate
  modified_base 8: mod_base = OTHER; note = 2'-O-methyluridine-3'-phosphate
  modified_base 9: mod_base = OTHER; note = 2'-fluoroguanosine-3'-phosphate
  modified_base 10: mod_base = OTHER; note = 2'-fluorouridine-3'-phosphate
  modified_base 11: mod_base = OTHER; note = 2'-fluorocytidine-3'-phosphate
  modified_base 12: mod_base = OTHER; note = 2'-O-methyladenosine-3'-phosphate
  modified_base 13: mod_base = OTHER; note = 2'-O-methyluridine-3'-phosphate
  modified_base 14: mod_base = OTHER; note = 2'-O-methylcytidine-3'-phosphate
  modified_base 15: mod_base = OTHER; note = 2'-O-methylguanosine-3'-phosphate
  modified_base 16: mod_base = OTHER; note = 2'-O-methyladenosine-3'-phosphate
  modified_base 17: mod_base = OTHER; note = 2'-O-methyladenosine-3'-phosphate
  modified_base 18: mod_base = OTHER; note = 2'-O-methylguanosine-3'-phosphate
  modified_base 19: mod_base = OTHER; note = 2'-O-methyladenosine-3'-phosphate
  modified_base 20: mod_base = OTHER; note = 2'-O-methylcytidine-3'-phosphate
  modified_base 21: mod_base = OTHER; note = 2'-O-methyladenosine-3'-phosphate N-[tris(GalNAc-alkyl)-amidodecanoyl)]-4-hydroxyprolinol Hyp-(GalNAc-alkyl)3
ttgttgatgtcatcgaagaca

SEQ ID NO: 3733 - RNA, 21 nt, synthetic construct
  source 1..21: mol_type = other RNA; note = Description of Artificial Sequence: Synthetic oligonucleotide
  modified_base 1: mod_base = OTHER; note = 2'-O-methyladenosine-3'-phosphorothioate
  modified_base 2: mod_base = OTHER; note = 2'-O-methylguanosine-3'-phosphorothioate
  modified_base 3: mod_base = OTHER; note = 2'-O-methyladenosine-3'-phosphate
  modified_base 4: mod_base = OTHER; note = 2'-O-methyluridine-3'-phosphate
  modified_base 5: mod_base = OTHER; note = 2'-O-methyluridine-3'-phosphate
  modified_base 6: mod_base = OTHER; note = 2'-O-methyluridine-3'-phosphate
  modified_base 7: mod_base = OTHER; note = 2'-fluoroguanosine-3'-phosphate
  modified_base 8: mod_base = OTHER; note = 2'-O-methylguanosine-3'-phosphate
  modified_base 9: mod_base = OTHER; note = 2'-fluorocytidine-3'-phosphate
  modified_base 10: mod_base = OTHER; note = 2'-fluoroadenosine-3'-phosphate
  modified_base 11: mod_base = OTHER; note = 2'-fluoroguanosine-3'-phosphate
  modified_base 12: mod_base = OTHER; note = 2'-O-methyladenosine-3'-phosphate
  modified_base 13: mod_base = OTHER; note = 2'-O-methylguanosine-3'-phosphate
  modified_base 14: mod_base = OTHER; note = 2'-O-methyladenosine-3'-phosphate
  modified_base 15: mod_base = OTHER; note = 2'-O-methylguanosine-3'-phosphate
  modified_base 16: mod_base = OTHER; note = 2'-O-methyluridine-3'-phosphate
  modified_base 17: mod_base = OTHER; note = 2'-O-methyladenosine-3'-phosphate
  modified_base 18: mod_base = OTHER; note = 2'-O-methyluridine-3'-phosphate
  modified_base 19: mod_base = OTHER; note = 2'-O-methyladenosine-3'-phosphate
  modified_base 20: mod_base = OTHER; note = 2'-O-methyladenosine-3'-phosphate
  modified_base 21: mod_base = OTHER; note = 2'-O-methyluridine-3'-phosphate N-[tris(GalNAc-alkyl)-amidodecanoyl)]-4-hydroxyprolinol Hyp-(GalNAc-alkyl)3
agatttggcagagagtataat

SEQ ID NO: 3734 - RNA, 21 nt, synthetic construct
  source 1..21: mol_type = other RNA; note = Description of Artificial Sequence: Synthetic oligonucleotide
  modified_base 1: mod_base = OTHER; note = 2'-O-methyluridine-3'-phosphorothioate
  modified_base 2: mod_base = OTHER; note = 2'-O-methyluridine-3'-phosphorothioate
  modified_base 3: mod_base = OTHER; note = 2'-O-methyluridine-3'-phosphate
  modified_base 4: mod_base = OTHER; note = 2'-O-methylcytidine-3'-phosphate
  modified_base 5: mod_base = OTHER; note = 2'-O-methylcytidine-3'-phosphate
  modified_base 6: mod_base = OTHER; note = 2'-O-methyladenosine-3'-phosphate
  modified_base 7: mod_base = OTHER; note = 2'-fluorocytidine-3'-phosphate
  modified_base 8: mod_base = OTHER; note = 2'-O-methylcytidine-3'-phosphate
  modified_base 9: mod_base = OTHER; note = 2'-fluoroadenosine-3'-phosphate
  modified_base 10: mod_base = OTHER; note = 2'-fluorouridine-3'-phosphate
  modified_base 11: mod_base = OTHER; note = 2'-fluoroguanosine-3'-phosphate
  modified_base 12: mod_base = OTHER; note = 2'-O-methyladenosine-3'-phosphate
  modified_base 13: mod_base = OTHER; note = 2'-O-methyluridine-3'-phosphate
  modified_base 14: mod_base = OTHER; note = 2'-O-methyluridine-3'-phosphate
  modified_base 15: mod_base = OTHER; note = 2'-O-methyladenosine-3'-phosphate
  modified_base 16: mod_base = OTHER; note = 2'-O-methyladenosine-3'-phosphate
  modified_base 17: mod_base = OTHER; note = 2'-O-methylguanosine-3'-phosphate
  modified_base 18: mod_base = OTHER; note = 2'-O-methylguanosine-3'-phosphate
  modified_base 19: mod_base = OTHER; note = 2'-O-methylguanosine-3'-phosphate
  modified_base 20: mod_base = OTHER; note = 2'-O-methyluridine-3'-phosphate
  modified_base 21: mod_base = OTHER; note = 2'-O-methyladenosine-3'-phosphate N-[tris(GalNAc-alkyl)-amidodecanoyl)]-4-hydroxyprolinol Hyp-(GalNAc-alkyl)3
tttccaccatgattaagggta

SEQ ID NO: 3735 - RNA, 21 nt, synthetic construct
  source 1..21: mol_type = other RNA; note = Description of Artificial Sequence: Synthetic oligonucleotide
  modified_base 1: mod_base = OTHER; note = 2'-O-methylcytidine-3'-phosphorothioate
  modified_base 2: mod_base = OTHER; note = 2'-O-methyluridine-3'-phosphorothioate
  modified_base 3: mod_base = OTHER; note = 2'-O-methyladenosine-3'-phosphate
  modified_base 4: mod_base = OTHER; note = 2'-O-methylguanosine-3'-phosphate
  modified_base 5: mod_base = OTHER; note = 2'-O-methylguanosine-3'-phosphate
  modified_base 6: mod_base = OTHER; note = 2'-O-methylcytidine-3'-phosphate
  modified_base 7: mod_base = OTHER; note = 2'-fluorouridine-3'-phosphate
  modified_base 8: mod_base = OTHER; note = 2'-O-methyladenosine-3'-phosphate
  modified_base 9: mod_base = OTHER; note = 2'-fluorocytidine-3'-phosphate
  modified_base 10: mod_base = OTHER; note = 2'-fluoroadenosine-3'-phosphate
  modified_base 11: mod_base = OTHER; note = 2'-fluoroadenosine-3'-phosphate
  modified_base 12: mod_base = OTHER; note = 2'-O-methylcytidine-3'-phosphate
  modified_base 13: mod_base = OTHER; note = 2'-O-methyladenosine-3'-phosphate
  modified_base 14: mod_base = OTHER; note = 2'-O-methylguanosine-3'-phosphate
  modified_base 15: mod_base = OTHER; note = 2'-O-methylguanosine-3'-phosphate
  modified_base 16: mod_base = OTHER; note = 2'-O-methyladenosine-3'-phosphate
  modified_base 17: mod_base = OTHER; note = 2'-O-methyluridine-3'-phosphate
  modified_base 18: mod_base = OTHER; note = 2'-O-methyluridine-3'-phosphate
  modified_base 19: mod_base = OTHER; note = 2'-O-methylcytidine-3'-phosphate
  modified_base 20: mod_base = OTHER; note = 2'-O-methyluridine-3'-phosphate
  modified_base 21: mod_base = OTHER; note = 2'-O-methyladenosine-3'-phosphate N-[tris(GalNAc-alkyl)-amidodecanoyl)]-4-hydroxyprolinol Hyp-(GalNAc-alkyl)3
ctaggctacaacaggattcta

SEQ ID NO: 3736 - RNA, 21 nt, synthetic construct
  source 1..21: mol_type = other RNA; note = Description of Artificial Sequence: Synthetic oligonucleotide
  modified_base 1: mod_base = OTHER; note = 2'-O-methyluridine-3'-phosphorothioate
  modified_base 2: mod_base = OTHER; note = 2'-O-methylguanosine-3'-phosphorothioate
  modified_base 3: mod_base = OTHER; note = 2'-O-methylguanosine-3'-phosphate
  modified_base 4: mod_base = OTHER; note = 2'-O-methyladenosine-3'-phosphate
  modified_base 5: mod_base = OTHER; note = 2'-O-methylguanosine-3'-phosphate
  modified_base 6: mod_base = OTHER; note = 2'-O-methylguanosine-3'-phosphate
  modified_base 7: mod_base = OTHER; note = 2'-fluorouridine-3'-phosphate
  modified_base 8: mod_base = OTHER; note = 2'-O-methyluridine-3'-phosphate
  modified_base 9: mod_base = OTHER; note = 2'-fluoroguanosine-3'-phosphate
  modified_base 10: mod_base = OTHER; note = 2'-fluorouridine-3'-phosphate
  modified_base 11: mod_base = OTHER; note = 2'-fluoroguanosine-3'-phosphate
  modified_base 12: mod_base = OTHER; note = 2'-O-methylcytidine-3'-phosphate
  modified_base 13: mod_base = OTHER; note = 2'-O-methyladenosine-3'-phosphate
  modified_base 14: mod_base = OTHER; note = 2'-O-methyluridine-3'-phosphate
  modified_base 15: mod_base = OTHER; note = 2'-O-methylguanosine-3'-phosphate
  modified_base 16: mod_base = OTHER; note = 2'-O-methyluridine-3'-phosphate
  modified_base 17: mod_base = OTHER; note = 2'-O-methyluridine-3'-phosphate
  modified_base 18: mod_base = OTHER; note = 2'-O-methylguanosine-3'-phosphate
  modified_base 19: mod_base = OTHER; note = 2'-O-methyluridine-3'-phosphate
  modified_base 20: mod_base = OTHER; note = 2'-O-methylcytidine-3'-phosphate
  modified_base 21: mod_base = OTHER; note = 2'-O-methyladenosine-3'-phosphate N-[tris(GalNAc-alkyl)-amidodecanoyl)]-4-hydroxyprolinol Hyp-(GalNAc-alkyl)3
tggaggttgtgcatgttgtca

SEQ ID NO: 3737 - RNA, 21 nt, synthetic construct
  source 1..21: mol_type = other RNA; note = Description of Artificial Sequence: Synthetic oligonucleotide
  modified_base 1: mod_base = OTHER; note = 2'-O-methylguanosine-3'-phosphorothioate
  modified_base 2: mod_base = OTHER; note = 2'-O-methylcytidine-3'-phosphorothioate
  modified_base 3: mod_base = OTHER; note = 2'-O-methyluridine-3'-phosphate
  modified_base 4: mod_base = OTHER; note = 2'-O-methylcytidine-3'-phosphate
  modified_base 5: mod_base = OTHER; note = 2'-O-methylcytidine-3'-phosphate
  modified_base 6: mod_base = OTHER; note = 2'-O-methyluridine-3'-phosphate
  modified_base 7: mod_base = OTHER; note = 2'-fluorouridine-3'-phosphate
  modified_base 8: mod_base = OTHER; note = 2'-O-methylcytidine-3'-phosphate
  modified_base 9: mod_base = OTHER; note = 2'-fluoroadenosine-3'-phosphate
  modified_base 10: mod_base = OTHER; note = 2'-fluorocytidine-3'-phosphate
  modified_base 11: mod_base = OTHER; note = 2'-fluorouridine-3'-phosphate
  modified_base 12: mod_base = OTHER; note = 2'-O-methylguanosine-3'-phosphate
  modified_base 13: mod_base = OTHER; note = 2'-O-methyladenosine-3'-phosphate
  modified_base 14: mod_base = OTHER; note = 2'-O-methyladenosine-3'-phosphate
  modified_base 15: mod_base = OTHER; note = 2'-O-methylcytidine-3'-phosphate
  modified_base 16: mod_base = OTHER; note = 2'-O-methyladenosine-3'-phosphate
  modified_base 17: mod_base = OTHER; note = 2'-O-methyluridine-3'-phosphate
  modified_base 18: mod_base = OTHER; note = 2'-O-methylguanosine-3'-phosphate
  modified_base 19: mod_base = OTHER; note = 2'-O-methylcytidine-3'-phosphate
  modified_base 20: mod_base = OTHER; note = 2'-O-methylcytidine-3'-phosphate
  modified_base 21: mod_base = OTHER; note = 2'-O-methyluridine-3'-phosphate N-[tris(GalNAc-alkyl)-amidodecanoyl)]-4-hydroxyprolinol Hyp-(GalNAc-alkyl)3
gctccttcactgaacatgcct

SEQ ID NO: 3738 - RNA, 21 nt, synthetic construct
  source 1..21: mol_type = other RNA; note = Description of Artificial Sequence: Synthetic oligonucleotide
  modified_base 1: mod_base = OTHER; note = 2'-O-methylcytidine-3'-phosphorothioate
  modified_base 2: mod_base = OTHER; note = 2'-O-methyluridine-3'-phosphorothioate
  modified_base 3: mod_base = OTHER; note = 2'-O-methyluridine-3'-phosphate
  modified_base 4: mod_base = OTHER; note = 2'-O-methyluridine-3'-phosphate
  modified_base 5: mod_base = OTHER; note = 2'-O-methyluridine-3'-phosphate
  modified_base 6: mod_base = OTHER; note = 2'-O-methylguanosine-3'-phosphate
  modified_base 7: mod_base = OTHER; note = 2'-fluoroguanosine-3'-phosphate
  modified_base 8: mod_base = OTHER; note = 2'-O-methyluridine-3'-phosphate
  modified_base 9: mod_base = OTHER; note = 2'-fluorouridine-3'-phosphate
  modified_base 10: mod_base = OTHER; note = 2'-fluorocytidine-3'-phosphate
  modified_base 11: mod_base = OTHER; note = 2'-fluorocytidine-3'-phosphate
  modified_base 12: mod_base = OTHER; note = 2'-O-methyladenosine-3'-phosphate
  modified_base 13: mod_base = OTHER; note = 2'-O-methyladenosine-3'-phosphate
  modified_base 14: mod_base = OTHER; note = 2'-O-methylguanosine-3'-phosphate
  modified_base 15: mod_base = OTHER; note = 2'-O-methyluridine-3'-phosphate
  modified_base 16: mod_base = OTHER; note = 2'-O-methylcytidine-3'-phosphate
  modified_base 17: mod_base = OTHER; note = 2'-O-methylcytidine-3'-phosphate
  modified_base 18: mod_base = OTHER; note = 2'-O-methyladenosine-3'-phosphate
  modified_base 19: mod_base = OTHER; note = 2'-O-methyladenosine-3'-phosphate
  modified_base 20: mod_base = OTHER; note = 2'-O-methyluridine-3'-phosphate
  modified_base 21: mod_base = OTHER; note = 2'-O-methyladenosine-3'-phosphate N-[tris(GalNAc-alkyl)-amidodecanoyl)]-4-hydroxyprolinol Hyp-(GalNAc-alkyl)3
cttttggttccaagtccaata

SEQ ID NO: 3739 - RNA, 21 nt, synthetic construct
  source 1..21: mol_type = other RNA; note = Description of Artificial Sequence: Synthetic oligonucleotide
  modified_base 1: mod_base = OTHER; note = 2'-O-methylguanosine-3'-phosphorothioate
  modified_base 2: mod_base = OTHER; note = 2'-O-methylcytidine-3'-phosphorothioate
  modified_base 3: mod_base = OTHER; note = 2'-O-methylcytidine-3'-phosphate
  modified_base 4: mod_base = OTHER; note = 2'-O-methyluridine-3'-phosphate
  modified_base 5: mod_base = OTHER; note = 2'-O-methylguanosine-3'-phosphate
  modified_base 6: mod_base = OTHER; note = 2'-O-methyluridine-3'-phosphate
  modified_base 7: mod_base = OTHER; note = 2'-fluoroguanosine-3'-phosphate
  modified_base 8: mod_base = OTHER; note = 2'-O-methylcytidine-3'-phosphate
  modified_base 9: mod_base = OTHER; note = 2'-fluorocytidine-3'-phosphate
  modified_base 10: mod_base = OTHER; note = 2'-fluoroadenosine-3'-phosphate
  modified_base 11: mod_base = OTHER; note = 2'-fluorouridine-3'-phosphate
  modified_base 12: mod_base = OTHER; note = 2'-O-methylcytidine-3'-phosphate
  modified_base 13: mod_base = OTHER; note = 2'-O-methyladenosine-3'-phosphate
  modified_base 14: mod_base = OTHER; note = 2'-O-methylguanosine-3'-phosphate
  modified_base 15: mod_base = OTHER; note = 2'-O-methyluridine-3'-phosphate
  modified_base 16: mod_base = OTHER; note = 2'-O-methyladenosine-3'-phosphate
  modified_base 17: mod_base = OTHER; note = 2'-O-methyluridine-3'-phosphate
  modified_base 18: mod_base = OTHER; note = 2'-O-methylcytidine-3'-phosphate
  modified_base 19: mod_base = OTHER; note = 2'-O-methyluridine-3'-phosphate
  modified_base 20: mod_base = OTHER; note = 2'-O-methyluridine-3'-phosphate
  modified_base 21: mod_base = OTHER; note = 2'-O-methyladenosine-3'-phosphate N-[tris(GalNAc-alkyl)-amidodecanoyl)]-4-hydroxyprolinol Hyp-(GalNAc-alkyl)3
gcctgtgccatcagtatctta

SEQ ID NO: 3740 - RNA, 21 nt, synthetic construct
  source 1..21: mol_type = other RNA; note = Description of Artificial Sequence: Synthetic oligonucleotide
  modified_base 1: mod_base = OTHER; note = 2'-O-methylguanosine-3'-phosphorothioate
  modified_base 2: mod_base = OTHER; note = 2'-O-methylcytidine-3'-phosphorothioate
  modified_base 3: mod_base = OTHER; note = 2'-O-methyluridine-3'-phosphate
  modified_base 4: mod_base = OTHER; note = 2'-O-methyluridine-3'-phosphate
  modified_base 5: mod_base = OTHER; note = 2'-O-methyladenosine-3'-phosphate
  modified_base 6: mod_base = OTHER; note = 2'-O-methyluridine-3'-phosphate
  modified_base 7: mod_base = OTHER; note = 2'-fluoroguanosine-3'-phosphate
  modified_base 8: mod_base = OTHER; note = 2'-O-methyladenosine-3'-phosphate
  modified_base 9: mod_base = OTHER; note = 2'-fluoroguanosine-3'-phosphate
  modified_base 10: mod_base = OTHER; note = 2'-fluoroguanosine-3'-phosphate
  modified_base 11: mod_base = OTHER; note = 2'-fluorouridine-3'-phosphate
  modified_base 12: mod_base = OTHER; note = 2'-O-methylguanosine-3'-phosphate
  modified_base 13: mod_base = OTHER; note = 2'-O-methyladenosine-3'-phosphate
  modified_base 14: mod_base = OTHER; note = 2'-O-methyluridine-3'-phosphate
  modified_base 15: mod_base = OTHER; note = 2'-O-methylcytidine-3'-phosphate
  modified_base 16: mod_base = OTHER; note = 2'-O-methyladenosine-3'-phosphate
  modified_base 17: mod_base = OTHER; note = 2'-O-methyladenosine-3'-phosphate
  modified_base 18: mod_base = OTHER; note = 2'-O-methyladenosine-3'-phosphate
  modified_base 19: mod_base = OTHER; note = 2'-O-methylcytidine-3'-phosphate
  modified_base 20: mod_base = OTHER; note = 2'-O-methyluridine-3'-phosphate
  modified_base 21: mod_base = OTHER; note = 2'-O-methyladenosine-3'-phosphate N-[tris(GalNAc-alkyl)-amidodecanoyl)]-4-hydroxyprolinol Hyp-(GalNAc-alkyl)3
gcttatgaggtgatcaaacta

SEQ ID NO: 3741 - RNA, 21 nt, synthetic construct
  source 1..21: mol_type = other RNA; note = Description of Artificial Sequence: Synthetic oligonucleotide
  modified_base 1: mod_base = OTHER; note = 2'-O-methylcytidine-3'-phosphorothioate
  modified_base 2: mod_base = OTHER; note = 2'-O-methyluridine-3'-phosphorothioate
  modified_base 3: mod_base = OTHER; note = 2'-O-methyluridine-3'-phosphate
  modified_base 4: mod_base = OTHER; note = 2'-O-methyladenosine-3'-phosphate
  modified_base 5: mod_base = OTHER; note = 2'-O-methyluridine-3'-phosphate
  modified_base 6: mod_base = OTHER; note = 2'-O-methylguanosine-3'-phosphate
  modified_base 7: mod_base = OTHER; note = 2'-fluoroadenosine-3'-phosphate
  modified_base 8: mod_base = OTHER; note = 2'-O-methylguanosine-3'-phosphate
  modified_base 9: mod_base = OTHER; note = 2'-fluoroguanosine-3'-phosphate
  modified_base 10: mod_base = OTHER; note = 2'-fluorouridine-3'-phosphate
  modified_base 11: mod_base = OTHER; note = 2'-fluoroguanosine-3'-phosphate
  modified_base 12: mod_base = OTHER; note = 2'-O-methyladenosine-3'-phosphate
  modified_base 13: mod_base = OTHER; note = 2'-O-methyluridine-3'-phosphate
  modified_base 14: mod_base = OTHER; note = 2'-O-methylcytidine-3'-phosphate
  modified_base 15: mod_base = OTHER; note = 2'-O-methyladenosine-3'-phosphate
  modified_base 16: mod_base = OTHER; note = 2'-O-methyladenosine-3'-phosphate
  modified_base 17: mod_base = OTHER; note = 2'-O-methyladenosine-3'-phosphate
  modified_base 18: mod_base = OTHER; note = 2'-O-methylcytidine-3'-phosphate
  modified_base 19: mod_base = OTHER; note = 2'-O-methyluridine-3'-phosphate
  modified_base 20: mod_base = OTHER; note = 2'-O-methylcytidine-3'-phosphate
  modified_base 21: mod_base = OTHER; note = 2'-O-methyladenosine-3'-phosphate N-[tris(GalNAc-alkyl)-amidodecanoyl)]-4-hydroxyprolinol Hyp-(GalNAc-alkyl)3
cttatgaggtgatcaaactca

SEQ ID NO: 3742 - RNA, 21 nt, synthetic construct
  source 1..21: mol_type = other RNA; note = Description of Artificial Sequence: Synthetic oligonucleotide
  modified_base 1: mod_base = OTHER; note = 2'-O-methylcytidine-3'-phosphorothioate
  modified_base 2: mod_base = OTHER; note = 2'-O-methylcytidine-3'-phosphorothioate
  modified_base 3: mod_base = OTHER; note = 2'-O-methyluridine-3'-phosphate
  modified_base 4: mod_base = OTHER; note = 2'-O-methyluridine-3'-phosphate
  modified_base 5: mod_base = OTHER; note = 2'-O-methylguanosine-3'-phosphate
  modified_base 6: mod_base = OTHER; note = 2'-O-methylcytidine-3'-phosphate
  modified_base 7: mod_base = OTHER; note = 2'-fluoroadenosine-3'-phosphate
  modified_base 8: mod_base = OTHER; note = 2'-O-methyluridine-3'-phosphate
  modified_base 9: mod_base = OTHER; note = 2'-fluorouridine-3'-phosphate
  modified_base 10: mod_base = OTHER; note = 2'-fluorouridine-3'-phosphate
  modified_base 11: mod_base = OTHER; note = 2'-fluorouridine-3'-phosphate
  modified_base 12: mod_base = OTHER; note = 2'-O-methylguanosine-3'-phosphate
  modified_base 13: mod_base = OTHER; note = 2'-O-methylguanosine-3'-phosphate
  modified_base 14: mod_base = OTHER; note = 2'-O-methylguanosine-3'-phosphate
  modified_base 15: mod_base = OTHER; note = 2'-O-methyladenosine-3'-phosphate
  modified_base 16: mod_base = OTHER; note = 2'-O-methylcytidine-3'-phosphate
  modified_base 17: mod_base = OTHER; note = 2'-O-methyladenosine-3'-phosphate
  modified_base 18: mod_base = OTHER; note = 2'-O-methylguanosine-3'-phosphate
  modified_base 19: mod_base = OTHER; note = 2'-O-methyladenosine-3'-phosphate
  modified_base 20: mod_base = OTHER; note = 2'-O-methyladenosine-3'-phosphate
  modified_base 21: mod_base = OTHER; note = 2'-O-methyluridine-3'-phosphate N-[tris(GalNAc-alkyl)-amidodecanoyl)]-4-hydroxyprolinol Hyp-(GalNAc-alkyl)3
ccttgcattttgggacagaat

SEQ ID NO: 3743 - RNA, 21 nt, synthetic construct
  source 1..21: mol_type = other RNA; note = Description of Artificial Sequence: Synthetic oligonucleotide
  modified_base 1: mod_base = OTHER; note = 2'-O-methylguanosine-3'-phosphorothioate
  modified_base 2: mod_base = OTHER; note = 2'-O-methylguanosine-3'-phosphorothioate
  modified_base 3: mod_base = OTHER; note = 2'-O-methyluridine-3'-phosphate
  modified_base 4: mod_base = OTHER; note = 2'-O-methyluridine-3'-phosphate
  modified_base 5: mod_base = OTHER; note = 2'-O-methylcytidine-3'-phosphate
  modified_base 6: mod_base = OTHER; note = 2'-O-methylcytidine-3'-phosphate
  modified_base 7: mod_base = OTHER; note = 2'-fluoroadenosine-3'-phosphate
  modified_base 8: mod_base = OTHER; note = 2'-O-methyladenosine-3'-phosphate
  modified_base 9: mod_base = OTHER; note = 2'-fluoroguanosine-3'-phosphate
  modified_base 10: mod_base = OTHER; note = 2'-fluorouridine-3'-phosphate
  modified_base 11: mod_base = OTHER; note = 2'-fluorocytidine-3'-phosphate
  modified_base 12: mod_base = OTHER; note = 2'-O-methylcytidine-3'-phosphate
  modified_base 13: mod_base = OTHER; note = 2'-O-methyladenosine-3'-phosphate
  modified_base 14: mod_base = OTHER; note = 2'-O-methyladenosine-3'-phosphate
  modified_base 15: mod_base = OTHER; note = 2'-O-methyluridine-3'-phosphate
  modified_base 16: mod_base = OTHER; note = 2'-O-methyladenosine-3'-phosphate
  modified_base 17: mod_base = OTHER; note = 2'-O-methyluridine-3'-phosphate
  modified_base 18: mod_base = OTHER; note = 2'-O-methylguanosine-3'-phosphate
  modified_base 19: mod_base = OTHER; note = 2'-O-methylguanosine-3'-phosphate
  modified_base 20: mod_base = OTHER; note = 2'-O-methylcytidine-3'-phosphate
  modified_base 21: mod_base = OTHER; note = 2'-O-methyladenosine-3'-phosphate N-[tris(GalNAc-alkyl)-amidodecanoyl)]-4-hydroxyprolinol Hyp-(GalNAc-alkyl)3
ggttccaagtccaatatggca

SEQ ID NO: 3744 - RNA, 21 nt, synthetic construct
  source 1..21: mol_type = other RNA; note = Description of Artificial Sequence: Synthetic oligonucleotide
  modified_base 1: mod_base = OTHER; note = 2'-O-methylcytidine-3'-phosphorothioate
  modified_base 2: mod_base = OTHER; note = 2'-O-methyladenosine-3'-phosphorothioate
  modified_base 3: mod_base = OTHER; note = 2'-O-methylcytidine-3'-phosphate
  modified_base 4: mod_base = OTHER; note = 2'-O-methyluridine-3'-phosphate
  modified_base 5: mod_base = OTHER; note = 2'-O-methylguanosine-3'-phosphate
  modified_base 6: mod_base = OTHER; note = 2'-O-methyluridine-3'-phosphate
  modified_base 7: mod_base = OTHER; note = 2'-fluorocytidine-3'-phosphate
  modified_base 8: mod_base = OTHER; note = 2'-O-methyluridine-3'-phosphate
  modified_base 9: mod_base = OTHER; note = 2'-fluoroadenosine-3'-phosphate
  modified_base 10: mod_base = OTHER; note = 2'-fluoroguanosine-3'-phosphate
  modified_base 11: mod_base = OTHER; note = 2'-fluoroguanosine-3'-phosphate
  modified_base 12: mod_base = OTHER; note = 2'-O-methylcytidine-3'-phosphate
  modified_base 13: mod_base = OTHER; note = 2'-O-methyluridine-3'-phosphate
  modified_base 14: mod_base = OTHER; note = 2'-O-methyladenosine-3'-phosphate
  modified_base 15: mod_base = OTHER; note = 2'-O-methylcytidine-3'-phosphate
  modified_base 16: mod_base = OTHER; note = 2'-O-methyladenosine-3'-phosphate
  modified_base 17: mod_base = OTHER; note = 2'-O-methyladenosine-3'-phosphate
  modified_base 18: mod_base = OTHER; note = 2'-O-methylcytidine-3'-phosphate
  modified_base 19: mod_base = OTHER; note = 2'-O-methyladenosine-3'-phosphate
  modified_base 20: mod_base = OTHER; note = 2'-O-methylguanosine-3'-phosphate
  modified_base 21: mod_base = OTHER; note = 2'-O-methyladenosine-3'-phosphate N-[tris(GalNAc-alkyl)-amidodecanoyl)]-4-hydroxyprolinol Hyp-(GalNAc-alkyl)3
cactgtctaggctacaacaga

SEQ ID NO: 3745 - RNA, 21 nt, synthetic construct
  source 1..21: mol_type = other RNA; note = Description of Artificial Sequence: Synthetic oligonucleotide
  modified_base 1: mod_base = OTHER; note = 2'-O-methyladenosine-3'-phosphorothioate
  modified_base 2: mod_base = OTHER; note = 2'-O-methylcytidine-3'-phosphorothioate
  modified_base 3: mod_base = OTHER; note = 2'-O-methyluridine-3'-phosphate
  modified_base 4: mod_base = OTHER; note = 2'-O-methylguanosine-3'-phosphate
  modified_base 5: mod_base = OTHER; note = 2'-O-methyluridine-3'-phosphate
  modified_base 6: mod_base = OTHER; note = 2'-O-methylcytidine-3'-phosphate
  modified_base 7: mod_base = OTHER; note = 2'-fluorouridine-3'-phosphate
  modified_base 8: mod_base = OTHER; note = 2'-O-methyladenosine-3'-phosphate
  modified_base 9: mod_base = OTHER; note = 2'-fluoroguanosine-3'-phosphate
  modified_base 10: mod_base = OTHER; note = 2'-fluoroguanosine-3'-phosphate
  modified_base 11: mod_base = OTHER; note = 2'-fluorocytidine-3'-phosphate
  modified_base 12: mod_base = OTHER; note = 2'-O-methyluridine-3'-phosphate
  modified_base 13: mod_base = OTHER; note = 2'-O-methyladenosine-3'-phosphate
  modified_base 14: mod_base = OTHER; note = 2'-O-methylcytidine-3'-phosphate
  modified_base 15: mod_base = OTHER; note = 2'-O-methyladenosine-3'-phosphate
  modified_base 16: mod_base = OTHER; note = 2'-O-methyladenosine-3'-phosphate
  modified_base 17: mod_base = OTHER; note = 2'-O-methylcytidine-3'-phosphate
  modified_base 18: mod_base = OTHER; note = 2'-O-methyladenosine-3'-phosphate
  modified_base 19: mod_base = OTHER; note = 2'-O-methylguanosine-3'-phosphate
  modified_base 20: mod_base = OTHER; note = 2'-O-methylguanosine-3'-phosphate
  modified_base 21: mod_base = OTHER; note = 2'-O-methyladenosine-3'-phosphate N-[tris(GalNAc-alkyl)-amidodecanoyl)]-4-hydroxyprolinol Hyp-(GalNAc-alkyl)3
actgtctaggctacaacagga

SEQ ID NO: 3746 - RNA, 21 nt, synthetic construct
  source 1..21: mol_type = other RNA; note = Description of Artificial Sequence: Synthetic oligonucleotide
  modified_base 1: mod_base = OTHER; note = 2'-O-methyladenosine-3'-phosphorothioate
  modified_base 2: mod_base = OTHER; note = 2'-O-methyladenosine-3'-phosphorothioate
  modified_base 3: mod_base = OTHER; note = 2'-O-methyluridine-3'-phosphate
  modified_base 4: mod_base = OTHER; note = 2'-O-methyladenosine-3'-phosphate
  modified_base 5: mod_base = OTHER; note = 2'-O-methyladenosine-3'-phosphate
  modified_base 6: mod_base = OTHER; note = 2'-O-methylguanosine-3'-phosphate
  modified_base 7: mod_base = OTHER; note = 2'-fluoroadenosine-3'-phosphate
  modified_base 8: mod_base = OTHER; note = 2'-O-methyluridine-3'-phosphate
  modified_base 9: mod_base = OTHER; note = 2'-fluorouridine-3'-phosphate
  modified_base 10: mod_base = OTHER; note = 2'-fluoroadenosine-3'-phosphate
  modified_base 11: mod_base = OTHER; note = 2'-fluorocytidine-3'-phosphate
  modified_base 12: mod_base = OTHER; note = 2'-O-methyladenosine-3'-phosphate
  modified_base 13: mod_base = OTHER; note = 2'-O-methylguanosine-3'-phosphate
  modified_base 14: mod_base = OTHER; note = 2'-O-methyluridine-3'-phosphate
  modified_base 15: mod_base = OTHER; note = 2'-O-methyluridine-3'-phosphate
  modified_base 16: mod_base = OTHER; note = 2'-O-methylguanosine-3'-phosphate
  modified_base 17: mod_base = OTHER; note = 2'-O-methyluridine-3'-phosphate
  modified_base 18: mod_base = OTHER; note = 2'-O-methyluridine-3'-phosphate
  modified_base 19: mod_base = OTHER; note = 2'-O-methylguanosine-3'-phosphate
  modified_base 20: mod_base = OTHER; note = 2'-O-methylguanosine-3'-phosphate
  modified_base 21: mod_base = OTHER; note = 2'-O-methyladenosine-3'-phosphate N-[tris(GalNAc-alkyl)-amidodecanoyl)]-4-hydroxyprolinol Hyp-(GalNAc-alkyl)3
aataagattacagttgttgga

SEQ ID NO: 3747 - RNA, 21 nt, synthetic construct
  source 1..21: mol_type = other RNA; note = Description of Artificial Sequence: Synthetic oligonucleotide
  modified_base 1: mod_base = OTHER; note = 2'-O-methylguanosine-3'-phosphorothioate
  modified_base 2: mod_base = OTHER; note = 2'-O-methyluridine-3'-phosphorothioate
  modified_base 3: mod_base = OTHER; note = 2'-O-methyluridine-3'-phosphate
  modified_base 4: mod_base = OTHER; note = 2'-O-methylguanosine-3'-phosphate
  modified_base 5: mod_base = OTHER; note = 2'-O-methyladenosine-3'-phosphate
  modified_base 6: mod_base = OTHER; note = 2'-O-methylguanosine-3'-phosphate
  modified_base 7: mod_base = OTHER; note = 2'-fluoroadenosine-3'-phosphate
  modified_base 8: mod_base = OTHER; note = 2'-O-methylguanosine-3'-phosphate
  modified_base 9: mod_base = OTHER; note = 2'-fluorouridine-3'-phosphate
  modified_base 10: mod_base = OTHER; note = 2'-fluoroguanosine-3'-phosphate
  modified_base 11: mod_base = OTHER; note = 2'-fluorocytidine-3'-phosphate
  modified_base 12: mod_base = OTHER; note = 2'-O-methyluridine-3'-phosphate
  modified_base 13: mod_base = OTHER; note = 2'-O-methyluridine-3'-phosphate
  modified_base 14: mod_base = OTHER; note = 2'-O-methyladenosine-3'-phosphate
  modified_base 15: mod_base = OTHER; note = 2'-O-methyluridine-3'-phosphate
  modified_base 16: mod_base = OTHER; note = 2'-O-methylguanosine-3'-phosphate
  modified_base 17: mod_base = OTHER; note = 2'-O-methyladenosine-3'-phosphate
  modified_base 18: mod_base = OTHER; note = 2'-O-methylguanosine-3'-phosphate
  modified_base 19: mod_base = OTHER; note = 2'-O-methylguanosine-3'-phosphate
  modified_base 20: mod_base = OTHER; note = 2'-O-methyluridine-3'-phosphate
  modified_base 21: mod_base = OTHER; note = 2'-O-methyladenosine-3'-phosphate N-[tris(GalNAc-alkyl)-amidodecanoyl)]-4-hydroxyprolinol Hyp-(GalNAc-alkyl)3
gttgagagtgcttatgaggta

SEQ ID NO: 3748 - RNA, 21 nt, synthetic construct
  source 1..21: mol_type = other RNA; note = Description of Artificial Sequence: Synthetic oligonucleotide
  modified_base 1: mod_base = OTHER; note = 2'-O-methylguanosine-3'-phosphorothioate
  modified_base 2: mod_base = OTHER; note = 2'-O-methyluridine-3'-phosphorothioate
  modified_base 3: mod_base = OTHER; note = 2'-O-methylcytidine-3'-phosphate
  modified_base 4: mod_base = OTHER; note = 2'-O-methyluridine-3'-phosphate
  modified_base 5: mod_base = OTHER; note = 2'-O-methyladenosine-3'-phosphate
  modified_base 6: mod_base = OTHER; note = 2'-O-methylguanosine-3'-phosphate
  modified_base 7: mod_base = OTHER; note = 2'-fluoroguanosine-3'-phosphate
  modified_base 8: mod_base = OTHER; note = 2'-O-methylcytidine-3'-phosphate
  modified_base 9: mod_base = OTHER; note = 2'-fluorouridine-3'-phosphate
  modified_base 10: mod_base = OTHER; note = 2'-fluoroadenosine-3'-phosphate
  modified_base 11: mod_base = OTHER; note = 2'-fluorocytidine-3'-phosphate
  modified_base 12: mod_base = OTHER; note = 2'-O-methyladenosine-3'-phosphate
  modified_base 13: mod_base = OTHER; note = 2'-O-methyladenosine-3'-phosphate
  modified_base 14: mod_base = OTHER; note = 2'-O-methylcytidine-3'-phosphate
  modified_base 15: mod_base = OTHER; note = 2'-O-methyladenosine-3'-phosphate
  modified_base 16: mod_base = OTHER; note = 2'-O-methylguanosine-3'-phosphate
  modified_base 17: mod_base = OTHER; note = 2'-O-methylguanosine-3'-phosphate
  modified_base 18: mod_base = OTHER; note = 2'-O-methyladenosine-3'-phosphate
  modified_base 19: mod_base = OTHER; note = 2'-O-methyluridine-3'-phosphate
  modified_base 20: mod_base = OTHER; note = 2'-O-methyluridine-3'-phosphate
  modified_base 21: mod_base = OTHER; note = 2'-O-methyladenosine-3'-phosphate N-[tris(GalNAc-alkyl)-amidodecanoyl)]-4-hydroxyprolinol Hyp-(GalNAc-alkyl)3
gtctaggctacaacaggatta

SEQ ID NO: 3749 - RNA, 21 nt, synthetic construct
  source 1..21: mol_type = other RNA; note = Description of Artificial Sequence: Synthetic oligonucleotide
  modified_base 1: mod_base = OTHER; note = 2'-O-methyluridine-3'-phosphorothioate
  modified_base 2: mod_base = OTHER; note = 2'-O-methylcytidine-3'-phosphorothioate
  modified_base 3: mod_base = OTHER; note = 2'-O-methyluridine-3'-phosphate
  modified_base 4: mod_base = OTHER; note = 2'-O-methyladenosine-3'-phosphate
  modified_base 5: mod_base = OTHER; note = 2'-O-methylguanosine-3'-phosphate
  modified_base 6: mod_base = OTHER; note = 2'-O-methylguanosine-3'-phosphate
  modified_base 7: mod_base = OTHER; note = 2'-fluorocytidine-3'-phosphate
  modified_base 8: mod_base = OTHER; note = 2'-O-methyluridine-3'-phosphate
  modified_base 9: mod_base = OTHER; note = 2'-fluoroadenosine-3'-phosphate
  modified_base 10: mod_base = OTHER; note = 2'-fluorocytidine-3'-phosphate
  modified_base 11: mod_base = OTHER; note = 2'-fluoroadenosine-3'-phosphate
  modified_base 12: mod_base = OTHER; note = 2'-O-methyladenosine-3'-phosphate
  modified_base 13: mod_base = OTHER; note = 2'-O-methylcytidine-3'-phosphate
  modified_base 14: mod_base = OTHER; note = 2'-O-methyladenosine-3'-phosphate
  modified_base 15: mod_base = OTHER; note = 2'-O-methylguanosine-3'-phosphate
  modified_base 16: mod_base = OTHER; note = 2'-O-methylguanosine-3'-phosphate
  modified_base 17: mod_base = OTHER; note = 2'-O-methyladenosine-3'-phosphate
  modified_base 18: mod_base = OTHER; note = 2'-O-methyluridine-3'-phosphate
  modified_base 19: mod_base = OTHER; note = 2'-O-methyluridine-3'-phosphate
  modified_base 20: mod_base = OTHER; note = 2'-O-methylcytidine-3'-phosphate
  modified_base 21: mod_base = OTHER; note = 2'-O-methyluridine-3'-phosphate N-[tris(GalNAc-alkyl)-amidodecanoyl)]-4-hydroxyprolinol Hyp-(GalNAc-alkyl)3
tctaggctacaacaggattct

SEQ ID NO: 3750 - RNA, 21 nt, synthetic construct
  source 1..21: mol_type = other RNA; note = Description of Artificial Sequence: Synthetic oligonucleotide
  modified_base 1: mod_base = OTHER; note = 2'-O-methylguanosine-3'-phosphorothioate
  modified_base 2: mod_base = OTHER; note = 2'-O-methyluridine-3'-phosphorothioate
  modified_base 3: mod_base = OTHER; note = 2'-O-methylguanosine-3'-phosphate
  modified_base 4: mod_base = OTHER; note = 2'-O-methylguanosine-3'-phosphate
  modified_base 5: mod_base = OTHER; note = 2'-O-methyladenosine-3'-phosphate
  modified_base 6: mod_base = OTHER; note = 2'-O-methylguanosine-3'-phosphate
  modified_base 7: mod_base = OTHER; note = 2'-fluoroguanosine-3'-phosphate
  modified_base 8: mod_base = OTHER; note = 2'-O-methyluridine-3'-phosphate
  modified_base 9: mod_base = OTHER; note = 2'-fluorouridine-3'-phosphate
  modified_base 10: mod_base = OTHER; note = 2'-fluoroguanosine-3'-phosphate
  modified_base 11: mod_base = OTHER; note = 2'-fluorouridine-3'-phosphate
  modified_base 12: mod_base = OTHER; note = 2'-O-methylguanosine-3'-phosphate
  modified_base 13: mod_base = OTHER; note = 2'-O-methylcytidine-3'-phosphate
  modified_base 14: mod_base = OTHER; note = 2'-O-methyladenosine-3'-phosphate
  modified_base 15: mod_base = OTHER; note = 2'-O-methyluridine-3'-phosphate
  modified_base 16: mod_base = OTHER; note = 2'-O-methylguanosine-3'-phosphate
  modified_base 17: mod_base = OTHER; note = 2'-O-methyluridine-3'-phosphate
  modified_base 18: mod_base = OTHER; note = 2'-O-methyluridine-3'-phosphate
  modified_base 19: mod_base = OTHER; note = 2'-O-methylguanosine-3'-phosphate
  modified_base 20: mod_base = OTHER; note = 2'-O-methyluridine-3'-phosphate
  modified_base 21: mod_base = OTHER; note = 2'-O-methyladenosine-3'-phosphate N-[tris(GalNAc-alkyl)-amidodecanoyl)]-4-hydroxyprolinol Hyp-(GalNAc-alkyl)3
gtggaggttgtgcatgttgta

SEQ ID NO: 3751 - RNA, 21 nt, synthetic construct
  source 1..21: mol_type = other RNA; note = Description of Artificial Sequence: Synthetic oligonucleotide
  modified_base 1: mod_base = OTHER; note = 2'-O-methyluridine-3'-phosphorothioate
  modified_base 2: mod_base = OTHER; note = 2'-O-methylguanosine-3'-phosphorothioate
  modified_base 3: mod_base = OTHER; note = 2'-O-methyladenosine-3'-phosphate
  modified_base 4: mod_base = OTHER; note = 2'-O-methylguanosine-3'-phosphate
  modified_base 5: mod_base = OTHER; note = 2'-O-methylguanosine-3'-phosphate
  modified_base 6: mod_base = OTHER; note = 2'-O-methyluridine-3'-phosphate
  modified_base 7: mod_base = OTHER; note = 2'-fluoroguanosine-3'-phosphate
  modified_base 8: mod_base = OTHER; note = 2'-O-methyladenosine-3'-phosphate
  modified_base 9: mod_base = OTHER; note = 2'-fluorouridine-3'-phosphate
  modified_base 10: mod_base = OTHER; note = 2'-fluorocytidine-3'-phosphate
  modified_base 11: mod_base = OTHER; note = 2'-fluoroadenosine-3'-phosphate
  modified_base 12: mod_base = OTHER; note = 2'-O-methyladenosine-3'-phosphate
  modified_base 13: mod_base = OTHER; note = 2'-O-methyladenosine-3'-phosphate
  modified_base 14: mod_base = OTHER; note = 2'-O-methylcytidine-3'-phosphate
  modified_base 15: mod_base = OTHER; note = 2'-O-methyluridine-3'-phosphate
  modified_base 16: mod_base = OTHER; note = 2'-O-methylcytidine-3'-phosphate
  modified_base 17: mod_base = OTHER; note = 2'-O-methyladenosine-3'-phosphate
  modified_base 18: mod_base = OTHER; note = 2'-O-methyladenosine-3'-phosphate
  modified_base 19: mod_base = OTHER; note = 2'-O-methyladenosine-3'-phosphate
  modified_base 20: mod_base = OTHER; note = 2'-O-methylguanosine-3'-phosphate
  modified_base 21: mod_base = OTHER; note = 2'-O-methyladenosine-3'-phosphate N-[tris(GalNAc-alkyl)-amidodecanoyl)]-4-hydroxyprolinol Hyp-(GalNAc-alkyl)3
tgaggtgatcaaactcaaaga

SEQ ID NO: 3752 - RNA, 21 nt, synthetic construct
  source 1..21: mol_type = other RNA; note = Description of Artificial Sequence: Synthetic oligonucleotide
  modified_base 1: mod_base = OTHER; note = 2'-O-methylguanosine-3'-phosphorothioate
  modified_base 2: mod_base = OTHER; note = 2'-O-methyluridine-3'-phosphorothioate
  modified_base 3: mod_base = OTHER; note = 2'-O-methylguanosine-3'-phosphate
  modified_base 4: mod_base = OTHER; note = 2'-O-methyladenosine-3'-phosphate
  modified_base 5: mod_base = OTHER; note = 2'-O-methyluridine-3'-phosphate
  modified_base 6: mod_base = OTHER; note = 2'-O-methylcytidine-3'-phosphate
  modified_base 7: mod_base = OTHER; note = 2'-fluoroadenosine-3'-phosphate
  modified_base 8: mod_base = OTHER; note = 2'-O-methyladenosine-3'-phosphate
  modified_base 9: mod_base = OTHER; note = 2'-fluoroadenosine-3'-phosphate
  modified_base 10: mod_base = OTHER; note = 2'-fluorocytidine-3'-phosphate
  modified_base 11: mod_base = OTHER; note = 2'-fluorouridine-3'-phosphate
  modified_base 12: mod_base = OTHER; note = 2'-O-methylcytidine-3'-phosphate
  modified_base 13: mod_base = OTHER; note = 2'-O-methyladenosine-3'-phosphate
  modified_base 14: mod_base = OTHER; note = 2'-O-methyladenosine-3'-phosphate
  modified_base 15: mod_base = OTHER; note = 2'-O-methyladenosine-3'-phosphate
  modified_base 16: mod_base = OTHER; note = 2'-O-methylguanosine-3'-phosphate
  modified_base 17: mod_base = OTHER; note = 2'-O-methylguanosine-3'-phosphate
  modified_base 18: mod_base = OTHER; note = 2'-O-methylcytidine-3'-phosphate
  modified_base 19: mod_base = OTHER; note = 2'-O-methyluridine-3'-phosphate
  modified_base 20: mod_base = OTHER; note = 2'-O-methyladenosine-3'-phosphate
  modified_base 21: mod_base = OTHER; note = 2'-O-methyladenosine-3'-phosphate N-[tris(GalNAc-alkyl)-amidodecanoyl)]-4-hydroxyprolinol Hyp-(GalNAc-alkyl)3
gtgatcaaactcaaaggctaa

SEQ ID NO: 3753 - RNA, 21 nt, synthetic construct
  source 1..21: mol_type = other RNA; note = Description of Artificial Sequence: Synthetic oligonucleotide
  modified_base 1: mod_base = OTHER; note = 2'-O-methyluridine-3'-phosphorothioate
  modified_base 2: mod_base = OTHER; note = 2'-O-methylguanosine-3'-phosphorothioate
  modified_base 3: mod_base = OTHER; note = 2'-O-methyladenosine-3'-phosphate
  modified_base 4: mod_base = OTHER; note = 2'-O-methylguanosine-3'-phosphate
  modified_base 5: mod_base = OTHER; note = 2'-O-methylguanosine-3'-phosphate
  modified_base 6: mod_base = OTHER; note = 2'-O-methyladenosine-3'-phosphate
  modified_base 7: mod_base = OTHER; note = 2'-fluoroadenosine-3'-phosphate
  modified_base 8: mod_base = OTHER; note = 2'-O-methylguanosine-3'-phosphate
  modified_base 9: mod_base = OTHER; note = 2'-fluoroadenosine-3'-phosphate
  modified_base 10: mod_base = OTHER; note = 2'-fluoroguanosine-3'-phosphate
  modified_base 11: mod_base = OTHER; note = 2'-fluoroguanosine-3'-phosphate
  modified_base 12: mod_base = OTHER; note = 2'-O-methylcytidine-3'-phosphate
  modified_base 13: mod_base = OTHER; note = 2'-O-methylcytidine-3'-phosphate
  modified_base 14: mod_base = OTHER; note = 2'-O-methylcytidine-3'-phosphate
  modified_base 15: mod_base = OTHER; note = 2'-O-methylguanosine-3'-phosphate
  modified_base 16: mod_base = OTHER; note = 2'-O-methyluridine-3'-phosphate
  modified_base 17: mod_base = OTHER; note = 2'-O-methyluridine-3'-phosphate
  modified_base 18: mod_base = OTHER; note = 2'-O-methyluridine-3'-phosphate
  modified_base 19: mod_base = OTHER; note = 2'-O-methylguanosine-3'-phosphate
  modified_base 20: mod_base = OTHER; note = 2'-O-methyladenosine-3'-phosphate
  modified_base 21: mod_base = OTHER; note = 2'-O-methyladenosine-3'-phosphate N-[tris(GalNAc-alkyl)-amidodecanoyl)]-4-hydroxyprolinol Hyp-(GalNAc-alkyl)3
tgaggaagaggcccgtttgaa

SEQ ID NO: 3754 - RNA, 21 nt, synthetic construct
  source 1..21: mol_type = other RNA; note = Description of Artificial Sequence: Synthetic oligonucleotide
  modified_base 1: mod_base = OTHER; note = 2'-O-methyladenosine-3'-phosphorothioate
  modified_base 2: mod_base = OTHER; note = 2'-O-methylcytidine-3'-phosphorothioate
  modified_base 3: mod_base = OTHER; note = 2'-O-methyladenosine-3'-phosphate
  modified_base 4: mod_base = OTHER; note = 2'-O-methyladenosine-3'-phosphate
  modified_base 5: mod_base = OTHER; note = 2'-O-methylguanosine-3'-phosphate
  modified_base 6: mod_base = OTHER; note = 2'-O-methylcytidine-3'-phosphate
  modified_base 7: mod_base = OTHER; note = 2'-fluoroadenosine-3'-phosphate
  modified_base 8: mod_base = OTHER; note = 2'-O-methylguanosine-3'-phosphate
  modified_base 9: mod_base = OTHER; note = 2'-fluoroguanosine-3'-phosphate
  modified_base 10: mod_base = OTHER; note = 2'-fluorouridine-3'-phosphate
  modified_base 11: mod_base = OTHER; note = 2'-fluoroguanosine-3'-phosphate
  modified_base 12: mod_base = OTHER; note = 2'-O-methylguanosine-3'-phosphate
  modified_base 13: mod_base = OTHER; note = 2'-O-methyluridine-3'-phosphate
  modified_base 14: mod_base = OTHER; note = 2'-O-methyluridine-3'-phosphate
  modified_base 15: mod_base = OTHER; note = 2'-O-methylguanosine-3'-phosphate
  modified_base 16: mod_base = OTHER; note = 2'-O-methyladenosine-3'-phosphate
  modified_base 17: mod_base = OTHER; note = 2'-O-methylguanosine-3'-phosphate
  modified_base 18: mod_base = OTHER; note = 2'-O-methyladenosine-3'-phosphate
  modified_base 19: mod_base = OTHER; note = 2'-O-methylguanosine-3'-phosphate
  modified_base 20: mod_base = OTHER; note = 2'-O-methyluridine-3'-phosphate
  modified_base 21: mod_base = OTHER; note = 2'-O-methyladenosine-3'-phosphate N-[tris(GalNAc-alkyl)-amidodecanoyl)]-4-hydroxyprolinol Hyp-(GalNAc-alkyl)3
acaagcaggtggttgagagta

SEQ ID NO: 3755 - RNA, 21 nt, synthetic construct
  source 1..21: mol_type = other RNA; note = Description of Artificial Sequence: Synthetic oligonucleotide
  modified_base 1: mod_base = OTHER; note = 2'-O-methylcytidine-3'-phosphorothioate
  modified_base 2: mod_base = OTHER; note = 2'-O-methyladenosine-3'-phosphorothioate
  modified_base 3: mod_base = OTHER; note = 2'-O-methylguanosine-3'-phosphate
  modified_base 4: mod_base = OTHER; note = 2'-O-methyladenosine-3'-phosphate
  modified_base 5: mod_base = OTHER; note = 2'-O-methyluridine-3'-phosphate
  modified_base 6: mod_base = OTHER; note = 2'-O-methyluridine-3'-phosphate
  modified_base 7: mod_base = OTHER; note = 2'-fluorouridine-3'-phosphate
  modified_base 8: mod_base = OTHER; note = 2'-O-methylguanosine-3'-phosphate
  modified_base 9: mod_base = OTHER; note = 2'-fluoroguanosine-3'-phosphate
  modified_base 10: mod_base = OTHER; note = 2'-fluorocytidine-3'-phosphate
  modified_base 11: mod_base = OTHER; note = 2'-fluoroadenosine-3'-phosphate
  modified_base 12: mod_base = OTHER; note = 2'-O-methylguanosine-3'-phosphate
  modified_base 13: mod_base = OTHER; note = 2'-O-methyladenosine-3'-phosphate
  modified_base 14: mod_base = OTHER; note = 2'-O-methylguanosine-3'-phosphate
  modified_base 15: mod_base = OTHER; note = 2'-O-methyladenosine-3'-phosphate
  modified_base 16: mod_base = OTHER; note = 2'-O-methylguanosine-3'-phosphate
  modified_base 17: mod_base = OTHER; note = 2'-O-methyluridine-3'-phosphate
  modified_base 18: mod_base = OTHER; note = 2'-O-methyladenosine-3'-phosphate
  modified_base 19: mod_base = OTHER; note = 2'-O-methyluridine-3'-phosphate
  modified_base 20: mod_base = OTHER; note = 2'-O-methyladenosine-3'-phosphate
  modified_base 21: mod_base = OTHER; note = 2'-O-methyladenosine-3'-phosphate N-[tris(GalNAc-alkyl)-amidodecanoyl)]-4-hydroxyprolinol Hyp-(GalNAc-alkyl)3
cagatttggcagagagtataa

SEQ ID NO: 3756 - RNA, 21 nt, synthetic construct
  source 1..21: mol_type = other RNA; note = Description of Artificial Sequence: Synthetic oligonucleotide
  modified_base 1: mod_base = OTHER; note = 2'-O-methylguanosine-3'-phosphorothioate
  modified_base 2: mod_base = OTHER; note = 2'-O-methyluridine-3'-phosphorothioate
  modified_base 3: mod_base = OTHER; note = 2'-O-methylguanosine-3'-phosphate
  modified_base 4: mod_base = OTHER; note = 2'-O-methylcytidine-3'-phosphate
  modified_base 5: mod_base = OTHER; note = 2'-O-methyluridine-3'-phosphate
  modified_base 6: mod_base = OTHER; note = 2'-O-methyluridine-3'-phosphate
  modified_base 7: mod_base = OTHER; note = 2'-fluoroadenosine-3'-phosphate
  modified_base 8: mod_base = OTHER; note = 2'-O-methyluridine-3'-phosphate
  modified_base 9: mod_base = OTHER; note = 2'-fluoroguanosine-3'-phosphate
  modified_base 10: mod_base = OTHER; note = 2'-fluoroadenosine-3'-phosphate
  modified_base 11: mod_base = OTHER; note = 2'-fluoroguanosine-3'-phosphate
  modified_base 12: mod_base = OTHER; note = 2'-O-methylguanosine-3'-phosphate
  modified_base 13: mod_base = OTHER; note = 2'-O-methyluridine-3'-phosphate
  modified_base 14: mod_base = OTHER; note = 2'-O-methylguanosine-3'-phosphate
  modified_base 15: mod_base = OTHER; note = 2'-O-methyladenosine-3'-phosphate
  modified_base 16: mod_base = OTHER; note = 2'-O-methyluridine-3'-phosphate
  modified_base 17: mod_base = OTHER; note = 2'-O-methylcytidine-3'-phosphate
  modified_base 18: mod_base = OTHER; note = 2'-O-methyladenosine-3'-phosphate
  modified_base 19: mod_base = OTHER; note = 2'-O-methyladenosine-3'-phosphate
  modified_base 20: mod_base = OTHER; note = 2'-O-methyladenosine-3'-phosphate
  modified_base 21: mod_base = OTHER; note = 2'-O-methylcytidine-3'-phosphate N-[tris(GalNAc-alkyl)-amidodecanoyl)]-4-hydroxyprolinol Hyp-(GalNAc-alkyl)3
gtgcttatgaggtgatcaaac

SEQ ID NO: 3757 - RNA, 21 nt, synthetic construct
  source 1..21: mol_type = other RNA; note = Description of Artificial Sequence: Synthetic oligonucleotide
  modified_base 1: mod_base = OTHER; note = 2'-O-methyladenosine-3'-phosphorothioate
  modified_base 2: mod_base = OTHER; note = 2'-O-methylguanosine-3'-phosphorothioate
  modified_base 3: mod_base = OTHER; note = 2'-O-methylcytidine-3'-phosphate
  modified_base 4: mod_base = OTHER; note = 2'-O-methyladenosine-3'-phosphate
  modified_base 5: mod_base = OTHER; note = 2'-O-methylguanosine-3'-phosphate
  modified_base 6: mod_base = OTHER; note = 2'-O-methyladenosine-3'-phosphate
  modified_base 7: mod_base = OTHER; note = 2'-fluorouridine-3'-phosphate
  modified_base 8: mod_base = OTHER; note = 2'-O-methyluridine-3'-phosphate
  modified_base 9: mod_base = OTHER; note = 2'-fluorouridine-3'-phosphate
  modified_base 10: mod_base = OTHER; note = 2'-fluoroguanosine-3'-phosphate
  modified_base 11: mod_base = OTHER; note = 2'-fluoroguanosine-3'-phosphate
  modified_base 12: mod_base = OTHER; note = 2'-O-methylcytidine-3'-phosphate
  modified_base 13: mod_base = OTHER; note = 2'-O-methyladenosine-3'-phosphate
  modified_base 14: mod_base = OTHER; note = 2'-O-methylguanosine-3'-phosphate
  modified_base 15: mod_base = OTHER; note = 2'-O-methyladenosine-3'-phosphate
  modified_base 16: mod_base = OTHER; note = 2'-O-methylguanosine-3'-phosphate
  modified_base 17: mod_base = OTHER; note = 2'-O-methyladenosine-3'-phosphate
  modified_base 18: mod_base = OTHER; note = 2'-O-methylguanosine-3'-phosphate
  modified_base 19: mod_base = OTHER; note = 2'-O-methyluridine-3'-phosphate
  modified_base 20: mod_base = OTHER; note = 2'-O-methyladenosine-3'-phosphate
  modified_base 21: mod_base = OTHER; note = 2'-O-methyluridine-3'-phosphate N-[tris(GalNAc-alkyl)-amidodecanoyl)]-4-hydroxyprolinol Hyp-(GalNAc-alkyl)3
agcagatttggcagagagtat

SEQ ID NO: 3758 - RNA, 21 nt, synthetic construct
  source 1..21: mol_type = other RNA; note = Description of Artificial Sequence: Synthetic oligonucleotide
  modified_base 1: mod_base = OTHER; note = 2'-O-methyladenosine-3'-phosphorothioate
  modified_base 2: mod_base = OTHER; note = 2'-O-methyluridine-3'-phosphorothioate
  modified_base 3: mod_base = OTHER; note = 2'-O-methyluridine-3'-phosphate
  modified_base 4: mod_base = OTHER; note = 2'-O-methyluridine-3'-phosphate
  modified_base 5: mod_base = OTHER; note = 2'-O-methylguanosine-3'-phosphate
  modified_base 6: mod_base = OTHER; note = 2'-O-methylguanosine-3'-phosphate
  modified_base 7: mod_base = OTHER; note = 2'-fluorocytidine-3'-phosphate
  modified_base 8: mod_base = OTHER; note = 2'-O-methyladenosine-3'-phosphate
  modified_base 9: mod_base = OTHER; note = 2'-fluoroguanosine-3'-phosphate
  modified_base 10: mod_base = OTHER; note = 2'-fluoroadenosine-3'-phosphate
  modified_base 11: mod_base = OTHER; note = 2'-fluoroguanosine-3'-phosphate
  modified_base 12: mod_base = OTHER; note = 2'-O-methyladenosine-3'-phosphate
  modified_base 13: mod_base = OTHER; note = 2'-O-methylguanosine-3'-phosphate
  modified_base 14: mod_base = OTHER; note = 2'-O-methyluridine-3'-phosphate
  modified_base 15: mod_base = OTHER; note = 2'-O-methyladenosine-3'-phosphate
  modified_base 16: mod_base = OTHER; note = 2'-O-methyluridine-3'-phosphate
  modified_base 17: mod_base = OTHER; note = 2'-O-methyladenosine-3'-phosphate
  modified_base 18: mod_base = OTHER; note = 2'-O-methyladenosine-3'-phosphate
  modified_base 19: mod_base = OTHER; note = 2'-O-methyluridine-3'-phosphate
  modified_base 20: mod_base = OTHER; note = 2'-O-methylguanosine-3'-phosphate
  modified_base 21: mod_base = OTHER; note = 2'-O-methyladenosine-3'-phosphate N-[tris(GalNAc-alkyl)-amidodecanoyl)]-4-hydroxyprolinol Hyp-(GalNAc-alkyl)3
atttggcagagagtataatga

SEQ ID NO: 3759 - RNA, 21 nt, synthetic construct
  source 1..21: mol_type = other RNA; note = Description of Artificial Sequence: Synthetic oligonucleotide
  modified_base 1: mod_base = OTHER; note = 2'-O-methyluridine-3'-phosphorothioate
  modified_base 2: mod_base = OTHER; note = 2'-O-methyluridine-3'-phosphorothioate
  modified_base 3: mod_base = OTHER; note = 2'-O-methyluridine-3'-phosphate
  modified_base 4: mod_base = OTHER; note = 2'-O-methylguanosine-3'-phosphate
  modified_base 5: mod_base = OTHER; note = 2'-O-methylguanosine-3'-phosphate
  modified_base 6: mod_base = OTHER; note = 2'-O-methylcytidine-3'-phosphate
  modified_base 7: mod_base = OTHER; note = 2'-fluoroadenosine-3'-phosphate
  modified_base 8: mod_base = OTHER; note = 2'-O-methylguanosine-3'-phosphate
  modified_base 9: mod_base = OTHER; note = 2'-fluoroadenosine-3'-phosphate
  modified_base 10: mod_base = OTHER; note = 2'-fluoroguanosine-3'-phosphate
  modified_base 11: mod_base = OTHER; note = 2'-fluoroadenosine-3'-phosphate
  modified_base 12: mod_base = OTHER; note = 2'-O-methylguanosine-3'-phosphate
  modified_base 13: mod_base = OTHER; note = 2'-O-methyluridine-3'-phosphate
  modified_base 14: mod_base = OTHER; note = 2'-O-methyladenosine-3'-phosphate
  modified_base 15: mod_base = OTHER; note = 2'-O-methyluridine-3'-phosphate
  modified_base 16: mod_base = OTHER; note = 2'-O-methyladenosine-3'-phosphate
  modified_base 17: mod_base = OTHER; note = 2'-O-methyladenosine-3'-phosphate
  modified_base 18: mod_base = OTHER; note = 2'-O-methyluridine-3'-phosphate
  modified_base 19: mod_base = OTHER; note = 2'-O-methylguanosine-3'-phosphate
  modified_base 20: mod_base = OTHER; note = 2'-O-methyladenosine-3'-phosphate
  modified_base 21: mod_base = OTHER; note = 2'-O-methyladenosine-3'-phosphate N-[tris(GalNAc-alkyl)-amidodecanoyl)]-4-hydroxyprolinol Hyp-(GalNAc-alkyl)3
tttggcagagagtataatgaa

SEQ ID NO: 3760 - RNA, 21 nt, synthetic construct
  source 1..21: mol_type = other RNA; note = Description of Artificial Sequence: Synthetic oligonucleotide
  modified_base 1: mod_base = OTHER; note = 2'-O-methylcytidine-3'-phosphorothioate
  modified_base 2: mod_base = OTHER; note = 2'-O-methyluridine-3'-phosphorothioate
  modified_base 3: mod_base = OTHER; note = 2'-O-methyluridine-3'-phosphate
  modified_base 4: mod_base = OTHER; note = 2'-O-methylguanosine-3'-phosphate
  modified_base 5: mod_base = OTHER; note = 2'-O-methylcytidine-3'-phosphate
  modified_base 6: mod_base = OTHER; note = 2'-O-methyladenosine-3'-phosphate
  modified_base 7: mod_base = OTHER; note = 2'-fluorouridine-3'-phosphate
  modified_base 8: mod_base = OTHER; note = 2'-O-methyluridine-3'-phosphate
  modified_base 9: mod_base = OTHER; note = 2'-fluorouridine-3'-phosphate
  modified_base 10: mod_base = OTHER; note = 2'-fluorouridine-3'-phosphate
  modified_base 11: mod_base = OTHER; note = 2'-fluoroguanosine-3'-phosphate
  modified_base 12: mod_base = OTHER; note = 2'-O-methylguanosine-3'-phosphate
  modified_base 13: mod_base = OTHER; note = 2'-O-methylguanosine-3'-phosphate
  modified_base 14: mod_base = OTHER; note = 2'-O-methyladenosine-3'-phosphate
  modified_base 15: mod_base = OTHER; note = 2'-O-methylcytidine-3'-phosphate
  modified_base 16: mod_base = OTHER; note = 2'-O-methyladenosine-3'-phosphate
  modified_base 17: mod_base = OTHER; note = 2'-O-methylguanosine-3'-phosphate
  modified_base 18: mod_base = OTHER; note = 2'-O-methyladenosine-3'-phosphate
  modified_base 19: mod_base = OTHER; note = 2'-O-methyladenosine-3'-phosphate
  modified_base 20: mod_base = OTHER; note = 2'-O-methyluridine-3'-phosphate
  modified_base 21: mod_base = OTHER; note = 2'-O-methyladenosine-3'-phosphate N-[tris(GalNAc-alkyl)-amidodecanoyl)]-4-hydroxyprolinol Hyp-(GalNAc-alkyl)3
cttgcattttgggacagaata

SEQ ID NO: 3761 - RNA, 21 nt, synthetic construct
  source 1..21: mol_type = other RNA; note = Description of Artificial Sequence: Synthetic oligonucleotide
  modified_base 1: mod_base = OTHER; note = 2'-O-methyladenosine-3'-phosphorothioate
  modified_base 2: mod_base = OTHER; note = 2'-O-methyluridine-3'-phosphorothioate
  modified_base 3: mod_base = OTHER; note = 2'-O-methylguanosine-3'-phosphate
  modified_base 4: mod_base = OTHER; note = 2'-O-methylguanosine-3'-phosphate
  modified_base 5: mod_base = OTHER; note = 2'-O-methyladenosine-3'-phosphate
  modified_base 6: mod_base = OTHER; note = 2'-O-methyladenosine-3'-phosphate
  modified_base 7: mod_base = OTHER; note = 2'-fluorouridine-3'-phosphate
  modified_base 8: mod_base = OTHER; note = 2'-O-methylcytidine-3'-phosphate
  modified_base 9: mod_base = OTHER; note = 2'-fluorouridine-3'-phosphate
  modified_base 10: mod_base = OTHER; note = 2'-fluorocytidine-3'-phosphate
  modified_base 11: mod_base = OTHER; note = 2'-fluoroadenosine-3'-phosphate
  modified_base 12: mod_base = OTHER; note = 2'-O-methylguanosine-3'-phosphate
  modified_base 13: mod_base = OTHER; note = 2'-O-methyladenosine-3'-phosphate
  modified_base 14: mod_base = OTHER; note = 2'-O-methylcytidine-3'-phosphate
  modified_base 15: mod_base = OTHER; note = 2'-O-methylcytidine-3'-phosphate
  modified_base 16: mod_base = OTHER; note = 2'-O-methyluridine-3'-phosphate
  modified_base 17: mod_base = OTHER; note = 2'-O-methyluridine-3'-phosphate
  modified_base 18: mod_base = OTHER; note = 2'-O-methylguanosine-3'-phosphate
  modified_base 19: mod_base = OTHER; note = 2'-O-methyluridine-3'-phosphate
  modified_base 20: mod_base = OTHER; note = 2'-O-methylguanosine-3'-phosphate
  modified_base 21: mod_base = OTHER; note = 2'-O-methyladenosine-3'-phosphate N-[tris(GalNAc-alkyl)-amidodecanoyl)]-4-hydroxyprolinol Hyp-(GalNAc-alkyl)3
atggaatctcagaccttgtga

SEQ ID NO: 3762 - RNA, 21 nt, synthetic construct
  source 1..21: mol_type = other RNA; note = Description of Artificial Sequence: Synthetic oligonucleotide
  modified_base 1: mod_base = OTHER; note = 2'-O-methylcytidine-3'-phosphorothioate
  modified_base 2: mod_base = OTHER; note = 2'-O-methyladenosine-3'-phosphorothioate
  modified_base 3: mod_base = OTHER; note = 2'-O-methylcytidine-3'-phosphate
  modified_base 4: mod_base = OTHER; note = 2'-O-methyladenosine-3'-phosphate
  modified_base 5: mod_base = OTHER; note = 2'-O-methylguanosine-3'-phosphate
  modified_base 6: mod_base = OTHER; note = 2'-O-methylcytidine-3'-phosphate
  modified_base 7: mod_base = OTHER; note = 2'-fluorouridine-3'-phosphate
  modified_base 8: mod_base = OTHER; note = 2'-O-methyladenosine-3'-phosphate
  modified_base 9: mod_base = OTHER; note = 2'-fluorouridine-3'-phosphate
  modified_base 10: mod_base = OTHER; note = 2'-fluoroadenosine-3'-phosphate
  modified_base 11: mod_base = OTHER; note = 2'-fluorouridine-3'-phosphate
  modified_base 12: mod_base = OTHER; note = 2'-O-methylcytidine-3'-phosphate
  modified_base 13: mod_base = OTHER; note = 2'-O-methylcytidine-3'-phosphate
  modified_base 14: mod_base = OTHER; note = 2'-O-methyluridine-3'-phosphate
  modified_base 15: mod_base = OTHER; note = 2'-O-methylguanosine-3'-phosphate
  modified_base 16: mod_base = OTHER; note = 2'-O-methyladenosine-3'-phosphate
  modified_base 17: mod_base = OTHER; note = 2'-O-methyluridine-3'-phosphate
  modified_base 18: mod_base = OTHER; note = 2'-O-methylguanosine-3'-phosphate
  modified_base 19: mod_base = OTHER; note = 2'-O-methylcytidine-3'-phosphate
  modified_base 20: mod_base = OTHER; note = 2'-O-methyluridine-3'-phosphate
  modified_base 21: mod_base = OTHER; note = 2'-O-methyladenosine-3'-phosphate N-[tris(GalNAc-alkyl)-amidodecanoyl)]-4-hydroxyprolinol Hyp-(GalNAc-alkyl)3
cacagctatatcctgatgcta

SEQ ID NO: 3763 - RNA, 21 nt, synthetic construct
  source 1..21: mol_type = other RNA; note = Description of Artificial Sequence: Synthetic oligonucleotide
  modified_base 1: mod_base = OTHER; note = 2'-O-methylguanosine-3'-phosphorothioate
  modified_base 2: mod_base = OTHER; note = 2'-O-methyladenosine-3'-phosphorothioate
  modified_base 3: mod_base = OTHER; note = 2'-O-methylguanosine-3'-phosphate
  modified_base 4: mod_base = OTHER; note = 2'-O-methylguanosine-3'-phosphate
  modified_base 5: mod_base = OTHER; note = 2'-O-methyladenosine-3'-phosphate
  modified_base 6: mod_base = OTHER; note = 2'-O-methyladenosine-3'-phosphate
  modified_base 7: mod_base = OTHER; note = 2'-fluoroguanosine-3'-phosphate
  modified_base 8: mod_base = OTHER; note = 2'-O-methyladenosine-3'-phosphate
  modified_base 9: mod_base = OTHER; note = 2'-fluoroguanosine-3'-phosphate
  modified_base 10: mod_base = OTHER; note = 2'-fluoroguanosine-3'-phosphate
  modified_base 11: mod_base = OTHER; note = 2'-fluorocytidine-3'-phosphate
  modified_base 12: mod_base = OTHER; note = 2'-O-methylcytidine-3'-phosphate
  modified_base 13: mod_base = OTHER; note = 2'-O-methylcytidine-3'-phosphate
  modified_base 14: mod_base = OTHER; note = 2'-O-methylguanosine-3'-phosphate
  modified_base 15: mod_base = OTHER; note = 2'-O-methyluridine-3'-phosphate
  modified_base 16: mod_base = OTHER; note = 2'-O-methyluridine-3'-phosphate
  modified_base 17: mod_base = OTHER; note = 2'-O-methyluridine-3'-phosphate
  modified_base 18: mod_base = OTHER; note = 2'-O-methylguanosine-3'-phosphate
  modified_base 19: mod_base = OTHER; note = 2'-O-methyladenosine-3'-phosphate
  modified_base 20: mod_base = OTHER; note = 2'-O-methyladenosine-3'-phosphate
  modified_base 21: mod_base = OTHER; note = 2'-O-methyladenosine-3'-phosphate N-[tris(GalNAc-alkyl)-amidodecanoyl)]-4-hydroxyprolinol Hyp-(GalNAc-alkyl)3
gaggaagaggcccgtttgaaa

SEQ ID NO: 3764 - RNA, 21 nt, synthetic construct
  source 1..21: mol_type = other RNA; note = Description of Artificial Sequence: Synthetic oligonucleotide
  modified_base 1: mod_base = OTHER; note = 2'-O-methyluridine-3'-phosphorothioate
  modified_base 2: mod_base = OTHER; note = 2'-O-methylcytidine-3'-phosphorothioate
  modified_base 3: mod_base = OTHER; note = 2'-O-methyluridine-3'-phosphate
  modified_base 4: mod_base = OTHER; note = 2'-O-methylguanosine-3'-phosphate
  modified_base 5: mod_base = OTHER; note = 2'-O-methyladenosine-3'-phosphate
  modified_base 6: mod_base = OTHER; note = 2'-O-methylguanosine-3'-phosphate
  modified_base 7: mod_base = OTHER; note = 2'-fluoroguanosine-3'-phosphate
  modified_base 8: mod_base = OTHER; note = 2'-O-methyladenosine-3'-phosphate
  modified_base 9: mod_base = OTHER; note = 2'-fluoroadenosine-3'-phosphate
  modified_base 10: mod_base = OTHER; note = 2'-fluoroguanosine-3'-phosphate
  modified_base 11: mod_base = OTHER; note = 2'-fluoroadenosine-3'-phosphate
  modified_base 12: mod_base = OTHER; note = 2'-O-methylguanosine-3'-phosphate
  modified_base 13: mod_base = OTHER; note = 2'-O-methylguanosine-3'-phosphate
  modified_base 14: mod_base = OTHER; note = 2'-O-methylcytidine-3'-phosphate
  modified_base 15: mod_base = OTHER; note = 2'-O-methylcytidine-3'-phosphate
  modified_base 16: mod_base = OTHER; note = 2'-O-methylcytidine-3'-phosphate
  modified_base 17: mod_base = OTHER; note = 2'-O-methylguanosine-3'-phosphate
  modified_base 18: mod_base = OTHER; note = 2'-O-methyluridine-3'-phosphate
  modified_base 19: mod_base = OTHER; note = 2'-O-methyluridine-3'-phosphate
  modified_base 20: mod_base = OTHER; note = 2'-O-methyluridine-3'-phosphate
  modified_base 21: mod_base = OTHER; note = 2'-O-methyladenosine-3'-phosphate N-[tris(GalNAc-alkyl)-amidodecanoyl)]-4-hydroxyprolinol Hyp-(GalNAc-alkyl)3
tctgaggaagaggcccgttta

SEQ ID NO: 3765 - RNA, 21 nt, synthetic construct
  source 1..21: mol_type = other RNA; note = Description of Artificial Sequence: Synthetic oligonucleotide
  modified_base 1: mod_base = OTHER; note = 2'-O-methylcytidine-3'-phosphorothioate
  modified_base 2: mod_base = OTHER; note = 2'-O-methyladenosine-3'-phosphorothioate
  modified_base 3: mod_base = OTHER; note = 2'-O-methylcytidine-3'-phosphate
  modified_base 4: mod_base = OTHER; note = 2'-O-methyladenosine-3'-phosphate
  modified_base 5: mod_base = OTHER; note = 2'-O-methyluridine-3'-phosphate
  modified_base 6: mod_base = OTHER; note = 2'-O-methylcytidine-3'-phosphate
  modified_base 7: mod_base = OTHER; note = 2'-fluorocytidine-3'-phosphate
  modified_base 8: mod_base = OTHER; note = 2'-O-methyluridine-3'-phosphate
  modified_base 9: mod_base = OTHER; note = 2'-fluoroguanosine-3'-phosphate
  modified_base 10: mod_base = OTHER; note = 2'-fluoroguanosine-3'-phosphate
  modified_base 11: mod_base = OTHER; note = 2'-fluoroguanosine-3'-phosphate
  modified_base 12: mod_base = OTHER; note = 2'-O-methyladenosine-3'-phosphate
  modified_base 13: mod_base = OTHER; note = 2'-O-methyluridine-3'-phosphate
  modified_base 14: mod_base = OTHER; note = 2'-O-methylcytidine-3'-phosphate
  modified_base 15: mod_base = OTHER; note = 2'-O-methylcytidine-3'-phosphate
  modified_base 16: mod_base = OTHER; note = 2'-O-methyladenosine-3'-phosphate
  modified_base 17: mod_base = OTHER; note = 2'-O-methylguanosine-3'-phosphate
  modified_base 18: mod_base = OTHER; note = 2'-O-methyluridine-3'-phosphate
  modified_base 19: mod_base = OTHER; note = 2'-O-methylguanosine-3'-phosphate
  modified_base 20: mod_base = OTHER; note = 2'-O-methyluridine-3'-phosphate
  modified_base 21: mod_base = OTHER; note = 2'-O-methyladenosine-3'-phosphate N-[tris(GalNAc-alkyl)-amidodecanoyl)]-4-hydroxyprolinol Hyp-(GalNAc-alkyl)3
cacatcctgggatccagtgta

SEQ ID NO: 3766 - RNA, 21 nt, synthetic construct
  source 1..21: mol_type = other RNA; note = Description of Artificial Sequence: Synthetic oligonucleotide
  modified_base 1: mod_base = OTHER; note = 2'-O-methyladenosine-3'-phosphorothioate
  modified_base 2: mod_base = OTHER; note = 2'-O-methylguanosine-3'-phosphorothioate
  modified_base 3: mod_base = OTHER; note = 2'-O-methylcytidine-3'-phosphate
  modified_base 4: mod_base = OTHER; note = 2'-O-methylcytidine-3'-phosphate
  modified_base 5: mod_base = OTHER; note = 2'-O-methyluridine-3'-phosphate
  modified_base 6: mod_base = OTHER; note = 2'-O-methyluridine-3'-phosphate
  modified_base 7: mod_base = OTHER; note = 2'-fluorouridine-3'-phosphate
  modified_base 8: mod_base = OTHER; note = 2'-O-methyluridine-3'-phosphate
  modified_base 9: mod_base = OTHER; note = 2'-fluorocytidine-3'-phosphate
  modified_base 10: mod_base = OTHER; note = 2'-fluorocytidine-3'-phosphate
  modified_base 11: mod_base = OTHER; note = 2'-fluorouridine-3'-phosphate
  modified_base 12: mod_base = OTHER; note = 2'-O-methyluridine-3'-phosphate
  modified_base 13: mod_base = OTHER; note = 2'-O-methyladenosine-3'-phosphate
  modified_base 14: mod_base = OTHER; note = 2'-O-methylguanosine-3'-phosphate
  modified_base 15: mod_base = OTHER; note = 2'-O-methyladenosine-3'-phosphate
  modified_base 16: mod_base = OTHER; note = 2'-O-methyladenosine-3'-phosphate
  modified_base 17: mod_base = OTHER; note = 2'-O-methylcytidine-3'-phosphate
  modified_base 18: mod_base = OTHER; note = 2'-O-methyladenosine-3'-phosphate
  modified_base 19: mod_base = OTHER; note = 2'-O-methylcytidine-3'-phosphate
  modified_base 20: mod_base = OTHER; note = 2'-O-methylcytidine-3'-phosphate
  modified_base 21: mod_base = OTHER; note = 2'-O-methyladenosine-3'-phosphate N-[tris(GalNAc-alkyl)-amidodecanoyl)]-4-hydroxyprolinol Hyp-(GalNAc-alkyl)3
agccttttccttagaacacca

SEQ ID NO: 3767 - RNA, 21 nt, synthetic construct
  source 1..21: mol_type = other RNA; note = Description of Artificial Sequence: Synthetic oligonucleotide
  modified_base 1: mod_base = OTHER; note = 2'-O-methyluridine-3'-phosphorothioate
  modified_base 2: mod_base = OTHER; note = 2'-O-methylcytidine-3'-phosphorothioate
  modified_base 3: mod_base = OTHER; note = 2'-O-methyladenosine-3'-phosphate
  modified_base 4: mod_base = OTHER; note = 2'-O-methyladenosine-3'-phosphate
  modified_base 5: mod_base = OTHER; note = 2'-O-methylcytidine-3'-phosphate
  modified_base 6: mod_base = OTHER; note = 2'-O-methyluridine-3'-phosphate
  modified_base 7: mod_base = OTHER; note = 2'-fluoroguanosine-3'-phosphate
  modified_base 8: mod_base = OTHER; note = 2'-O-methylguanosine-3'-phosphate
  modified_base 9: mod_base = OTHER; note = 2'-fluorouridine-3'-phosphate
  modified_base 10: mod_base = OTHER; note = 2'-fluorouridine-3'-phosphate
  modified_base 11: mod_base = OTHER; note = 2'-fluoroadenosine-3'-phosphate
  modified_base 12: mod_base = OTHER; note = 2'-O-methylguanosine-3'-phosphate
  modified_base 13: mod_base = OTHER; note = 2'-O-methyluridine-3'-phosphate
  modified_base 14: mod_base = OTHER; note = 2'-O-methylguanosine-3'-phosphate
  modified_base 15: mod_base = OTHER; note = 2'-O-methyluridine-3'-phosphate
  modified_base 16: mod_base = OTHER; note = 2'-O-methylguanosine-3'-phosphate
  modified_base 17: mod_base = OTHER; note = 2'-O-methyladenosine-3'-phosphate
  modified_base 18: mod_base = OTHER; note = 2'-O-methyladenosine-3'-phosphate
  modified_base 19: mod_base = OTHER; note = 2'-O-methyladenosine-3'-phosphate
  modified_base 20: mod_base = OTHER; note = 2'-O-methyluridine-3'-phosphate
  modified_base 21: mod_base = OTHER; note = 2'-O-methyladenosine-3'-phosphate N-[tris(GalNAc-alkyl)-amidodecanoyl)]-4-hydroxyprolinol Hyp-(GalNAc-alkyl)3
tcaactggttagtgtgaaata

SEQ ID NO: 3768 - RNA, 23 nt, synthetic construct
  source 1..23: mol_type = other RNA; note = Description of Artificial Sequence: Synthetic oligonucleotide
  modified_base 1: mod_base = OTHER; note = 2'-O-methyluridine-3'-phosphorothioate
  modified_base 2: mod_base = OTHER; note = 2'-fluorouridine -3'-phosphorothioate
  modified_base 3: mod_base = OTHER; note = 2'-O-methyluridine-3'-phosphate
  modified_base 4: mod_base = OTHER; note = 2'-O-methyladenosine-3'-phosphate
  modified_base 5: mod_base = OTHER; note = 2'-O-methyladenosine-3'-phosphate
  modified_base 6: mod_base = OTHER; note = 2'-fluorouridine-3'-phosphate
  modified_base 7: mod_base = OTHER; note = 2'-O-methylcytidine-3'-phosphate
  modified_base 8: mod_base = OTHER; note = 2'-fluoroadenosine-3'-phosphate
  modified_base 9: mod_base = OTHER; note = 2'-fluorocytidine-3'-phosphate
  modified_base 10: mod_base = OTHER; note = 2'-O-methyladenosine-3'-phosphate
  modified_base 11: mod_base = OTHER; note = 2'-O-methylguanosine-3'-phosphate
  modified_base 12: mod_base = OTHER; note = 2'-O-methyladenosine-3'-phosphate
  modified_base 13: mod_base = OTHER; note = 2'-O-methyluridine-3'-phosphate
  modified_base 14: mod_base = OTHER; note = 2'-fluorocytidine-3'-phosphate
  modified_base 15: mod_base = OTHER; note = 2'-O-methyladenosine-3'-phosphate
  modified_base 16: mod_base = OTHER; note = 2'-fluoroguanosine-3'-phosphate
  modified_base 17: mod_base = OTHER; note = 2'-O-methyladenosine-3'-phosphate
  modified_base 18: mod_base = OTHER; note = 2'-O-methyluridine-3'-phosphate
  modified_base 19: mod_base = OTHER; note = 2'-O-methyladenosine-3'-phosphate
  modified_base 20: mod_base = OTHER; note = 2'-O-methyladenosine-3'-phosphate
  modified_base 21: mod_base = OTHER; note = 2'-O-methyladenosine-3'-phosphorothioate
  modified_base 22: mod_base = OTHER; note = 2'-O-methyladenosine-3'-phosphorothioate
  modified_base 23: mod_base = OTHER; note = 2'-O-methyladenosine-3'-phosphate
tttaatcacagatcagataaaaa

SEQ ID NO: 3769 - RNA, 23 nt, synthetic construct
  source 1..23: mol_type = other RNA; note = Description of Artificial Sequence: Synthetic oligonucleotide
  modified_base 1: mod_base = OTHER; note = 2'-O-methyladenosine-3'-phosphorothioate
  modified_base 2: mod_base = OTHER; note = 2'-fluoroadenosine-3'-phosphorothioate
  modified_base 3: mod_base = OTHER; note = 2'-O-methylcytidine-3'-phosphate
  modified_base 4: mod_base = OTHER; note = 2'-O-methyluridine-3'-phosphate
  modified_base 5: mod_base = OTHER; note = 2'-O-methyladenosine-3'-phosphate
  modified_base 6: mod_base = OTHER; note = 2'-fluorouridine-3'-phosphate
  modified_base 7: mod_base = OTHER; note = 2'-O-methyluridine-3'-phosphate
  modified_base 8: mod_base = OTHER; note = 2'-fluorouridine-3'-phosphate
  modified_base 9: mod_base = OTHER; note = 2'-fluorocytidine-3'-phosphate
  modified_base 10: mod_base = OTHER; note = 2'-O-methyladenosine-3'-phosphate
  modified_base 11: mod_base = OTHER; note = 2'-O-methylcytidine-3'-phosphate
  modified_base 12: mod_base = OTHER; note = 2'-O-methyladenosine-3'-phosphate
  modified_base 13: mod_base = OTHER; note = 2'-O-methylcytidine-3'-phosphate
  modified_base 14: mod_base = OTHER; note = 2'-fluorouridine-3'-phosphate
  modified_base 15: mod_base = OTHER; note = 2'-O-methyladenosine-3'-phosphate
  modified_base 16: mod_base = OTHER; note = 2'-fluoroadenosine-3'-phosphate
  modified_base 17: mod_base = OTHER; note = 2'-O-methylcytidine-3'-phosphate
  modified_base 18: mod_base = OTHER; note = 2'-O-methylcytidine-3'-phosphate
  modified_base 19: mod_base = OTHER; note = 2'-O-methyladenosine-3'-phosphate
  modified_base 20: mod_base = OTHER; note = 2'-O-methylguanosine-3'-phosphate
  modified_base 21: mod_base = OTHER; note = 2'-O-methyluridine-3'-phosphorothioate
  modified_base 22: mod_base = OTHER; note = 2'-O-methyluridine-3'-phosphorothioate
  modified_base 23: mod_base = OTHER; note = 2'-O-methylguanosine-3'-phosphate
aactatttcacactaaccagttg

SEQ ID NO: 3770 - RNA, 23 nt, synthetic construct
  source 1..23: mol_type = other RNA; note = Description of Artificial Sequence: Synthetic oligonucleotide
  modified_base 1: mod_base = OTHER; note = 2'-O-methyladenosine-3'-phosphorothioate
  modified_base 2: mod_base = OTHER; note = 2'-fluoroadenosine-3'-phosphorothioate
  modified_base 3: mod_base = OTHER; note = 2'-O-methyladenosine-3'-phosphate
  modified_base 4: mod_base = OTHER; note = 2'-O-methyluridine-3'-phosphate
  modified_base 5: mod_base = OTHER; note = 2'-O-methylguanosine-3'-phosphate
  modified_base 6: mod_base = OTHER; note = 2'-fluorouridine-3'-phosphate
  modified_base 7: mod_base = OTHER; note = 2'-O-methyluridine-3'-phosphate
  modified_base 8: mod_base = OTHER; note = 2'-fluoroguanosine-3'-phosphate
  modified_base 9: mod_base = OTHER; note = 2'-fluoroguanosine-3'-phosphate
  modified_base 10: mod_base = OTHER; note = 2'-O-methyladenosine-3'-phosphate
  modified_base 11: mod_base = OTHER; note = 2'-O-methylcytidine-3'-phosphate
  modified_base 12: mod_base = OTHER; note = 2'-O-methyluridine-3'-phosphate
  modified_base 13: mod_base = OTHER; note = 2'-O-methyladenosine-3'-phosphate
  modified_base 14: mod_base = OTHER; note = 2'-fluoroguanosine-3'-phosphate
  modified_base 15: mod_base = OTHER; note = 2'-O-methylguanosine-3'-phosphate
  modified_base 16: mod_base = OTHER; note = 2'-fluorocytidine-3'-phosphate
  modified_base 17: mod_base = OTHER; note = 2'-O-methyladenosine-3'-phosphate
  modified_base 18: mod_base = OTHER; note = 2'-O-methyluridine-3'-phosphate
  modified_base 19: mod_base = OTHER; note = 2'-O-methylguanosine-3'-phosphate
  modified_base 20: mod_base = OTHER; note = 2'-O-methyluridine-3'-phosphate
  modified_base 21: mod_base = OTHER; note = 2'-O-methyluridine-3'-phosphorothioate
  modified_base 22: mod_base = OTHER; note = 2'-O-methylcytidine-3'-phosphorothioate
  modified_base 23: mod_base = OTHER; note = 2'-O-methyladenosine-3'-phosphate
aaatgttggactaggcatgttca

SEQ ID NO: 3771 - RNA, 23 nt, synthetic construct
  source 1..23: mol_type = other RNA; note = Description of Artificial Sequence: Synthetic oligonucleotide
  modified_base 1: mod_base = OTHER; note = 2'-O-methyladenosine-3'-phosphorothioate
  modified_base 2: mod_base = OTHER; note = 2'-fluoroguanosine-3'-phosphorothioate
  modified_base 3: mod_base = OTHER; note = 2'-O-methyladenosine-3'-phosphate
  modified_base 4: mod_base = OTHER; note = 2'-O-methylguanosine-3'-phosphate
  modified_base 5: mod_base = OTHER; note = 2'-O-methyluridine-3'-phosphate
  modified_base 6: mod_base = OTHER; note = 2'-fluorouridine-3'-phosphate
  modified_base 7: mod_base = OTHER; note = 2'-O-methylguanosine-3'-phosphate
  modified_base 8: mod_base = OTHER; note = 2'-fluorocytidine-3'-phosphate
  modified_base 9: mod_base = OTHER; note = 2'-fluorocytidine-3'-phosphate
  modified_base 10: mod_base = OTHER; note = 2'-O-methyladenosine-3'-phosphate
  modified_base 11: mod_base = OTHER; note = 2'-O-methyluridine-3'-phosphate
  modified_base 12: mod_base = OTHER; note = 2'-O-methyladenosine-3'-phosphate
  modified_base 13: mod_base = OTHER; note = 2'-O-methyluridine-3'-phosphate
  modified_base 14: mod_base = OTHER; note = 2'-fluorouridine-3'-phosphate
  modified_base 15: mod_base = OTHER; note = 2'-O-methylguanosine-3'-phosphate
  modified_base 16: mod_base = OTHER; note = 2'-fluoroguanosine-3'-phosphate
  modified_base 17: mod_base = OTHER; note = 2'-O-methyladenosine-3'-phosphate
  modified_base 18: mod_base = OTHER; note = 2'-O-methylcytidine-3'-phosphate
  modified_base 19: mod_base = OTHER; note = 2'-O-methyluridine-3'-phosphate
  modified_base 20: mod_base = OTHER; note = 2'-O-methyluridine-3'-phosphate
  modified_base 21: mod_base = OTHER; note = 2'-O-methylguanosine-3'-phosphorothioate
  modified_base 22: mod_base = OTHER; note = 2'-O-methylguanosine-3'-phosphorothioate
  modified_base 23: mod_base = OTHER; note = 2'-O-methyladenosine-3'-phosphate
agagttgccatattggacttgga

SEQ ID NO: 3772 - RNA, 23 nt, synthetic construct
  source 1..23: mol_type = other RNA; note = Description of Artificial Sequence: Synthetic oligonucleotide
  modified_base 1: mod_base = OTHER; note = 2'-O-methyladenosine-3'-phosphorothioate
  modified_base 2: mod_base = OTHER; note = 2'-fluoroadenosine-3'-phosphorothioate
  modified_base 3: mod_base = OTHER; note = 2'-O-methylguanosine-3'-phosphate
  modified_base 4: mod_base = OTHER; note = 2'-O-methyladenosine-3'-phosphate
  modified_base 5: mod_base = OTHER; note = 2'-O-methylcytidine-3'-phosphate
  modified_base 6: mod_base = OTHER; note = 2'-fluorocytidine-3'-phosphate
  modified_base 7: mod_base = OTHER; note = 2'-O-methylcytidine-3'-phosphate
  modified_base 8: mod_base = OTHER; note = 2'-fluorouridine-3'-phosphate
  modified_base 9: mod_base = OTHER; note = 2'-fluorouridine-3'-phosphate
  modified_base 10: mod_base = OTHER; note = 2'-O-methyladenosine-3'-phosphate
  modified_base 11: mod_base = OTHER; note = 2'-O-methyladenosine-3'-phosphate
  modified_base 12: mod_base = OTHER; note = 2'-O-methyluridine-3'-phosphate
  modified_base 13: mod_base = OTHER; note = 2'-O-methylcytidine-3'-phosphate
  modified_base 14: mod_base = OTHER; note = 2'-fluoroadenosine-3'-phosphate
  modified_base 15: mod_base = OTHER; note = 2'-O-methyluridine-3'-phosphate
  modified_base 16: mod_base = OTHER; note = 2'-fluoroguanosine-3'-phosphate
  modified_base 17: mod_base = OTHER; note = 2'-O-methylguanosine-3'-phosphate
  modified_base 18: mod_base = OTHER; note = 2'-O-methyluridine-3'-phosphate
  modified_base 19: mod_base = OTHER; note = 2'-O-methylguanosine-3'-phosphate
  modified_base 20: mod_base = OTHER; note = 2'-O-methylguanosine-3'-phosphate
  modified_base 21: mod_base = OTHER; note = 2'-O-methyladenosine-3'-phosphorothioate
  modified_base 22: mod_base = OTHER; note = 2'-O-methyladenosine-3'-phosphorothioate
  modified_base 23: mod_base = OTHER; note = 2'-O-methyladenosine-3'-phosphate
aagacccttaatcatggtggaaa

SEQ ID NO: 3773 - RNA, 23 nt, synthetic construct
  source 1..23: mol_type = other RNA; note = Description of Artificial Sequence: Synthetic oligonucleotide
  modified_base 1: mod_base = OTHER; note = 2'-O-methyluridine-3'-phosphorothioate
  modified_base 2: mod_base = OTHER; note = 2'-fluorouridine -3'-phosphorothioate
  modified_base 3: mod_base = OTHER; note = 2'-O-methyladenosine-3'-phosphate
  modified_base 4: mod_base = OTHER; note = 2'-O-methylguanosine-3'-phosphate
  modified_base 5: mod_base = OTHER; note = 2'-O-methylcytidine-3'-phosphate
  modified_base 6: mod_base = OTHER; note = 2'-fluorocytidine-3'-phosphate
  modified_base 7: mod_base = OTHER; note = 2'-O-methyluridine-3'-phosphate
  modified_base 8: mod_base = OTHER; note = 2'-fluoroadenosine-3'-phosphate
  modified_base 9: mod_base = OTHER; note = 2'-fluoroguanosine-3'-phosphate
  modified_base 10: mod_base = OTHER; note = 2'-O-methyladenosine-3'-phosphate
  modified_base 11: mod_base = OTHER; note = 2'-O-methylcytidine-3'-phosphate
  modified_base 12: mod_base = OTHER; note = 2'-O-methyladenosine-3'-phosphate
  modified_base 13: mod_base = OTHER; note = 2'-O-methylguanosine-3'-phosphate
  modified_base 14: mod_base = OTHER; note = 2'-fluorouridine-3'-phosphate
  modified_base 15: mod_base = OTHER; note = 2'-O-methylguanosine-3'-phosphate
  modified_base 16: mod_base = OTHER; note = 2'-fluoroadenosine-3'-phosphate
  modified_base 17: mod_base = OTHER; note = 2'-O-methyladenosine-3'-phosphate
  modified_base 18: mod_base = OTHER; note = 2'-O-methyladenosine-3'-phosphate
  modified_base 19: mod_base = OTHER; note = 2'-O-methyluridine-3'-phosphate
  modified_base 20: mod_base = OTHER; note = 2'-O-methylguanosine-3'-phosphate
  modified_base 21: mod_base = OTHER; note = 2'-O-methyladenosine-3'-phosphorothioate
  modified_base 22: mod_base = OTHER; note = 2'-O-methyluridine-3'-phosphorothioate
  modified_base 23: mod_base = OTHER; note = 2'-O-methyladenosine-3'-phosphate
ttagcctagacagtgaaatgata

SEQ ID NO: 3774 - RNA, 23 nt, synthetic construct
  source 1..23: mol_type = other RNA; note = Description of Artificial Sequence: Synthetic oligonucleotide
  modified_base 1: mod_base = OTHER; note = 2'-O-methyladenosine-3'-phosphorothioate
  modified_base 2: mod_base = OTHER; note = 2'-fluorocytidine-3'-phosphorothioate
  modified_base 3: mod_base = OTHER; note = 2'-O-methyladenosine-3'-phosphate
  modified_base 4: mod_base = OTHER; note = 2'-O-methylguanosine-3'-phosphate
  modified_base 5: mod_base = OTHER; note = 2'-O-methyladenosine-3'-phosphate
  modified_base 6: mod_base = OTHER; note = 2'-fluorouridine-3'-phosphate
  modified_base 7: mod_base = OTHER; note = 2'-O-methylcytidine-3'-phosphate
  modified_base 8: mod_base = OTHER; note = 2'-fluoroadenosine-3'-phosphate
  modified_base 9: mod_base = OTHER; note = 2'-fluoroguanosine-3'-phosphate
  modified_base 10: mod_base = OTHER; note = 2'-O-methyladenosine-3'-phosphate
  modified_base 11: mod_base = OTHER; note = 2'-O-methyluridine-3'-phosphate
  modified_base 12: mod_base = OTHER; note = 2'-O-methyladenosine-3'-phosphate
  modified_base 13: mod_base = OTHER; note = 2'-O-methyladenosine-3'-phosphate
  modified_base 14: mod_base = OTHER; note = 2'-fluoroadenosine-3'-phosphate
  modified_base 15: mod_base = OTHER; note = 2'-O-methyladenosine-3'-phosphate
  modified_base 16: mod_base = OTHER; note = 2'-fluoroadenosine-3'-phosphate
  modified_base 17: mod_base = OTHER; note = 2'-O-methylguanosine-3'-phosphate
  modified_base 18: mod_base = OTHER; note = 2'-O-methylguanosine-3'-phosphate
  modified_base 19: mod_base = OTHER; note = 2'-O-methyladenosine-3'-phosphate
  modified_base 20: mod_base = OTHER; note = 2'-O-methylcytidine-3'-phosphate
  modified_base 21: mod_base = OTHER; note = 2'-O-methyladenosine-3'-phosphorothioate
  modified_base 22: mod_base = OTHER; note = 2'-O-methyladenosine-3'-phosphorothioate
  modified_base 23: mod_base = OTHER; note = 2'-O-methylcytidine-3'-phosphate
acagatcagataaaaaggacaac

SEQ ID NO: 3775 - RNA, 23 nt, synthetic construct
  source 1..23: mol_type = other RNA; note = Description of Artificial Sequence: Synthetic oligonucleotide
  modified_base 1: mod_base = OTHER; note = 2'-O-methyluridine-3'-phosphorothioate
  modified_base 2: mod_base = OTHER; note = 2'-fluoroadenosine-3'-phosphorothioate
  modified_base 3: mod_base = OTHER; note = 2'-O-methyluridine-3'-phosphate
  modified_base 4: mod_base = OTHER; note = 2'-O-methyladenosine-3'-phosphate
  modified_base 5: mod_base = OTHER; note = 2'-O-methyluridine-3'-phosphate
  modified_base 6: mod_base = OTHER; note = 2'-fluorouridine-3'-phosphate
  modified_base 7: mod_base = OTHER; note = 2'-O-methylguanosine-3'-phosphate
  modified_base 8: mod_base = OTHER; note = 2'-fluoroguanosine-3'-phosphate
  modified_base 9: mod_base = OTHER; note = 2'-fluoroadenosine-3'-phosphate
  modified_base 10: mod_base = OTHER; note = 2'-O-methyluridine-3'-phosphate
  modified_base 11: mod_base = OTHER; note = 2'-O-methyluridine-3'-phosphate
  modified_base 12: mod_base = OTHER; note = 2'-O-methyluridine-3'-phosphate
  modified_base 13: mod_base = OTHER; note = 2'-O-methyladenosine-3'-phosphate
  modified_base 14: mod_base = OTHER; note = 2'-fluorouridine-3'-phosphate
  modified_base 15: mod_base = OTHER; note = 2'-O-methyladenosine-3'-phosphate
  modified_base 16: mod_base = OTHER; note = 2'-fluorocytidine-3'-phosphate
  modified_base 17: mod_base = OTHER; note = 2'-O-methyladenosine-3'-phosphate
  modified_base 18: mod_base = OTHER; note = 2'-O-methylcytidine-3'-phosphate
  modified_base 19: mod_base = OTHER; note = 2'-O-methyluridine-3'-phosphate
  modified_base 20: mod_base = OTHER; note = 2'-O-methylguanosine-3'-phosphate
  modified_base 21: mod_base = OTHER; note = 2'-O-methylguanosine-3'-phosphorothioate
  modified_base 22: mod_base = OTHER; note = 2'-O-methyladenosine-3'-phosphorothioate
  modified_base 23: mod_base = OTHER; note = 2'-O-methyluridine-3'-phosphate
tatattggatttatacactggat

SEQ ID NO: 3776 - RNA, 23 nt, synthetic construct
  source 1..23: mol_type = other RNA; note = Description of Artificial Sequence: Synthetic oligonucleotide
  modified_base 1: mod_base = OTHER; note = 2'-O-methyluridine-3'-phosphorothioate
  modified_base 2: mod_base = OTHER; note = 2'-fluorouridine -3'-phosphorothioate
  modified_base 3: mod_base = OTHER; note = 2'-O-methyladenosine-3'-phosphate
  modified_base 4: mod_base = OTHER; note = 2'-O-methylguanosine-3'-phosphate
  modified_base 5: mod_base = OTHER; note = 2'-O-methyluridine-3'-phosphate
  modified_base 6: mod_base = OTHER; note = 2'-fluorouridine-3'-phosphate
  modified_base 7: mod_base = OTHER; note = 2'-O-methylguanosine-3'-phosphate
  modified_base 8: mod_base = OTHER; note = 2'-fluoroguanosine-3'-phosphate
  modified_base 9: mod_base = OTHER; note = 2'-fluorouridine-3'-phosphate
  modified_base 10: mod_base = OTHER; note = 2'-O-methyladenosine-3'-phosphate
  modified_base 11: mod_base = OTHER; note = 2'-O-methyluridine-3'-phosphate
  modified_base 12: mod_base = OTHER; note = 2'-O-methyladenosine-3'-phosphate
  modified_base 13: mod_base = OTHER; note = 2'-O-methyladenosine-3'-phosphate
  modified_base 14: mod_base = OTHER; note = 2'-fluorocytidine-3'-phosphate
  modified_base 15: mod_base = OTHER; note = 2'-O-methyladenosine-3'-phosphate
  modified_base 16: mod_base = OTHER; note = 2'-fluorocytidine-3'-phosphate
  modified_base 17: mod_base = OTHER; note = 2'-O-methyluridine-3'-phosphate
  modified_base 18: mod_base = OTHER; note = 2'-O-methyluridine-3'-phosphate
  modified_base 19: mod_base = OTHER; note = 2'-O-methylguanosine-3'-phosphate
  modified_base 20: mod_base = OTHER; note = 2'-O-methylguanosine-3'-phosphate
  modified_base 21: mod_base = OTHER; note = 2'-O-methyladenosine-3'-phosphorothioate
  modified_base 22: mod_base = OTHER; note = 2'-O-methyluridine-3'-phosphorothioate
  modified_base 23: mod_base = OTHER; note = 2'-O-methyladenosine-3'-phosphate
ttagttggtataacacttggata

SEQ ID NO: 3777 - RNA, 23 nt, synthetic construct
  source 1..23: mol_type = other RNA; note = Description of Artificial Sequence: Synthetic oligonucleotide
  modified_base 1: mod_base = OTHER; note = 2'-O-methyluridine-3'-phosphorothioate
  modified_base 2: mod_base = OTHER; note = 2'-fluorouridine -3'-phosphorothioate
  modified_base 3: mod_base = OTHER; note = 2'-O-methyluridine-3'-phosphate
  modified_base 4: mod_base = OTHER; note = 2'-O-methylcytidine-3'-phosphate
  modified_base 5: mod_base = OTHER; note = 2'-O-methyladenosine-3'-phosphate
  modified_base 6: mod_base = OTHER; note = 2'-fluoroadenosine-3'-phosphate
  modified_base 7: mod_base = OTHER; note = 2'-O-methyluridine-3'-phosphate
  modified_base 8: mod_base = OTHER; note = 2'-fluorouridine-3'-phosphate
  modified_base 9: mod_base = OTHER; note = 2'-fluorouridine-3'-phosphate
  modified_base 10: mod_base = OTHER; note = 2'-O-methylguanosine-3'-phosphate
  modified_base 11: mod_base = OTHER; note = 2'-O-methyluridine-3'-phosphate
  modified_base 12: mod_base = OTHER; note = 2'-O-methylcytidine-3'-phosphate
  modified_base 13: mod_base = OTHER; note = 2'-O-methyluridine-3'-phosphate
  modified_base 14: mod_base = OTHER; note = 2'-fluorouridine-3'-phosphate
  modified_base 15: mod_base = OTHER; note = 2'-O-methylcytidine-3'-phosphate
  modified_base 16: mod_base = OTHER; note = 2'-fluoroguanosine-3'-phosphate
  modified_base 17: mod_base = OTHER; note = 2'-O-methyladenosine-3'-phosphate
  modified_base 18: mod_base = OTHER; note = 2'-O-methyluridine-3'-phosphate
  modified_base 19: mod_base = OTHER; note = 2'-O-methylguanosine-3'-phosphate
  modified_base 20: mod_base = OTHER; note = 2'-O-methyladenosine-3'-phosphate
  modified_base 21: mod_base = OTHER; note = 2'-O-methylcytidine-3'-phosphorothioate
  modified_base 22: mod_base = OTHER; note = 2'-O-methyladenosine-3'-phosphorothioate
  modified_base 23: mod_base = OTHER; note = 2'-O-methyluridine-3'-phosphate
tttcaatttgtcttcgatgacat

SEQ ID NO: 3778 - RNA, 23 nt, synthetic construct
  source 1..23: mol_type = other RNA; note = Description of Artificial Sequence: Synthetic oligonucleotide
  modified_base 1: mod_base = OTHER; note = 2'-O-methyluridine-3'-phosphorothioate
  modified_base 2: mod_base = OTHER; note = 2'-fluoroadenosine-3'-phosphorothioate
  modified_base 3: mod_base = OTHER; note = 2'-O-methylguanosine-3'-phosphate
  modified_base 4: mod_base = OTHER; note = 2'-O-methyladenosine-3'-phosphate
  modified_base 5: mod_base = OTHER; note = 2'-O-methylguanosine-3'-phosphate
  modified_base 6: mod_base = OTHER; note = 2'-fluoroadenosine-3'-phosphate
  modified_base 7: mod_base = OTHER; note = 2'-O-methylcytidine-3'-phosphate
  modified_base 8: mod_base = OTHER; note = 2'-fluoroadenosine-3'-phosphate
  modified_base 9: mod_base = OTHER; note = 2'-fluoroadenosine-3'-phosphate
  modified_base 10: mod_base = OTHER; note = 2'-O-methyluridine-3'-phosphate
  modified_base 11: mod_base = OTHER; note = 2'-O-methylcytidine-3'-phosphate
  modified_base 12: mod_base = OTHER; note = 2'-O-methyluridine-3'-phosphate
  modified_base 13: mod_base = OTHER; note = 2'-O-methyluridine-3'-phosphate
  modified_base 14: mod_base = OTHER; note = 2'-fluorouridine-3'-phosphate
  modified_base 15: mod_base = OTHER; note = 2'-O-methylguanosine-3'-phosphate
  modified_base 16: mod_base = OTHER; note = 2'-fluoroguanosine-3'-phosphate
  modified_base 17: mod_base = OTHER; note = 2'-O-methyluridine-3'-phosphate
  modified_base 18: mod_base = OTHER; note = 2'-O-methylguanosine-3'-phosphate
  modified_base 19: mod_base = OTHER; note = 2'-O-methyluridine-3'-phosphate
  modified_base 20: mod_base = OTHER; note = 2'-O-methyluridine-3'-phosphate
  modified_base 21: mod_base = OTHER; note = 2'-O-methylcytidine-3'-phosphorothioate
  modified_base 22: mod_base = OTHER; note = 2'-O-methyluridine-3'-phosphorothioate
  modified_base 23: mod_base = OTHER; note = 2'-O-methyladenosine-3'-phosphate
tagagacaatctttggtgttcta

SEQ ID NO: 3779 - RNA, 23 nt, synthetic construct
  source 1..23: mol_type = other RNA; note = Description of Artificial Sequence: Synthetic oligonucleotide
  modified_base 1: mod_base = OTHER; note = 2'-O-methyluridine-3'-phosphorothioate
  modified_base 2: mod_base = OTHER; note = 2'-fluorocytidine-3'-phosphorothioate
  modified_base 3: mod_base = OTHER; note = 2'-O-methyladenosine-3'-phosphate
  modified_base 4: mod_base = OTHER; note = 2'-O-methylguanosine-3'-phosphate
  modified_base 5: mod_base = OTHER; note = 2'-O-methyladenosine-3'-phosphate
  modified_base 6: mod_base = OTHER; note = 2'-fluoroguanosine-3'-phosphate
  modified_base 7: mod_base = OTHER; note = 2'-O-methyladenosine-3'-phosphate
  modified_base 8: mod_base = OTHER; note = 2'-fluorocytidine-3'-phosphate
  modified_base 9: mod_base = OTHER; note = 2'-fluoroadenosine-3'-phosphate
  modified_base 10: mod_base = OTHER; note = 2'-O-methyladenosine-3'-phosphate
  modified_base 11: mod_base = OTHER; note = 2'-O-methyluridine-3'-phosphate
  modified_base 12: mod_base = OTHER; note = 2'-O-methylcytidine-3'-phosphate
  modified_base 13: mod_base = OTHER; note = 2'-O-methyluridine-3'-phosphate
  modified_base 14: mod_base = OTHER; note = 2'-fluorouridine-3'-phosphate
  modified_base 15: mod_base = OTHER; note = 2'-O-methyluridine-3'-phosphate
  modified_base 16: mod_base = OTHER; note = 2'-fluoroguanosine-3'-phosphate
  modified_base 17: mod_base = OTHER; note = 2'-O-methylguanosine-3'-phosphate
  modified_base 18: mod_base = OTHER; note = 2'-O-methyluridine-3'-phosphate
  modified_base 19: mod_base = OTHER; note = 2'-O-methylguanosine-3'-phosphate
  modified_base 20: mod_base = OTHER; note = 2'-O-methyluridine-3'-phosphate
  modified_base 21: mod_base = OTHER; note = 2'-O-methyluridine-3'-phosphorothioate
  modified_base 22: mod_base = OTHER; note = 2'-O-methylcytidine-3'-phosphorothioate
  modified_base 23: mod_base = OTHER; note = 2'-O-methyluridine-3'-phosphate
tcagagacaatctttggtgttct

SEQ ID NO: 3780 - RNA, 23 nt, synthetic construct
  source 1..23: mol_type = other RNA; note = Description of Artificial Sequence: Synthetic oligonucleotide
  modified_base 1: mod_base = OTHER; note = 2'-O-methyladenosine-3'-phosphorothioate
  modified_base 2: mod_base = OTHER; note = 2'-fluorouridine -3'-phosphorothioate
  modified_base 3: mod_base = OTHER; note = 2'-O-methylcytidine-3'-phosphate
  modified_base 4: mod_base = OTHER; note = 2'-O-methyladenosine-3'-phosphate
  modified_base 5: mod_base = OTHER; note = 2'-O-methylguanosine-3'-phosphate
  modified_base 6: mod_base = OTHER; note = 2'-fluoroadenosine-3'-phosphate
  modified_base 7: mod_base = OTHER; note = 2'-O-methyluridine-3'-phosphate
  modified_base 8: mod_base = OTHER; note = 2'-fluoroadenosine-3'-phosphate
  modified_base 9: mod_base = OTHER; note = 2'-fluoroadenosine-3'-phosphate
  modified_base 10: mod_base = OTHER; note = 2'-O-methyladenosine-3'-phosphate
  modified_base 11: mod_base = OTHER; note = 2'-O-methyladenosine-3'-phosphate
  modified_base 12: mod_base = OTHER; note = 2'-O-methyladenosine-3'-phosphate
  modified_base 13: mod_base = OTHER; note = 2'-O-methylguanosine-3'-phosphate
  modified_base 14: mod_base = OTHER; note = 2'-fluoroguanosine-3'-phosphate
  modified_base 15: mod_base = OTHER; note = 2'-O-methyladenosine-3'-phosphate
  modified_base 16: mod_base = OTHER; note = 2'-fluorocytidine-3'-phosphate
  modified_base 17: mod_base = OTHER; note = 2'-O-methyladenosine-3'-phosphate
  modified_base 18: mod_base = OTHER; note = 2'-O-methyladenosine-3'-phosphate
  modified_base 19: mod_base = OTHER; note = 2'-O-methylcytidine-3'-phosphate
  modified_base 20: mod_base = OTHER; note = 2'-O-methyladenosine-3'-phosphate
  modified_base 21: mod_base = OTHER; note = 2'-O-methyluridine-3'-phosphorothioate
  modified_base 22: mod_base = OTHER; note = 2'-O-methylguanosine-3'-phosphorothioate
  modified_base 23: mod_base = OTHER; note = 2'-O-methylcytidine-3'-phosphate
atcagataaaaaggacaacatgc

SEQ ID NO: 3781 - RNA, 23 nt, synthetic construct
  source 1..23: mol_type = other RNA; note = Description of Artificial Sequence: Synthetic oligonucleotide
  modified_base 1: mod_base = OTHER; note = 2'-O-methyladenosine-3'-phosphorothioate
  modified_base 2: mod_base = OTHER; note = 2'-fluorouridine -3'-phosphorothioate
  modified_base 3: mod_base = OTHER; note = 2'-O-methyluridine-3'-phosphate
  modified_base 4: mod_base = OTHER; note = 2'-O-methyluridine-3'-phosphate
  modified_base 5: mod_base = OTHER; note = 2'-O-methylcytidine-3'-phosphate
  modified_base 6: mod_base = OTHER; note = 2'-fluorouridine-3'-phosphate
  modified_base 7: mod_base = OTHER; note = 2'-O-methyladenosine-3'-phosphate
  modified_base 8: mod_base = OTHER; note = 2'-fluoroadenosine-3'-phosphate
  modified_base 9: mod_base = OTHER; note = 2'-fluorocytidine-3'-phosphate
  modified_base 10: mod_base = OTHER; note = 2'-O-methyluridine-3'-phosphate
  modified_base 11: mod_base = OTHER; note = 2'-O-methyluridine-3'-phosphate
  modified_base 12: mod_base = OTHER; note = 2'-O-methylcytidine-3'-phosphate
  modified_base 13: mod_base = OTHER; note = 2'-O-methyladenosine-3'-phosphate
  modified_base 14: mod_base = OTHER; note = 2'-fluoroguanosine-3'-phosphate
  modified_base 15: mod_base = OTHER; note = 2'-O-methylguanosine-3'-phosphate
  modified_base 16: mod_base = OTHER; note = 2'-fluoroadenosine-3'-phosphate
  modified_base 17: mod_base = OTHER; note = 2'-O-methylguanosine-3'-phosphate
  modified_base 18: mod_base = OTHER; note = 2'-O-methyluridine-3'-phosphate
  modified_base 19: mod_base = OTHER; note = 2'-O-methyluridine-3'-phosphate
  modified_base 20: mod_base = OTHER; note = 2'-O-methylguanosine-3'-phosphate
  modified_base 21: mod_base = OTHER; note = 2'-O-methyladenosine-3'-phosphorothioate
  modified_base 22: mod_base = OTHER; note = 2'-O-methyluridine-3'-phosphorothioate
  modified_base 23: mod_base = OTHER; note = 2'-O-methylguanosine-3'-phosphate
atttctaacttcaggagttgatg

SEQ ID NO: 3782 - RNA, 23 nt, synthetic construct
  source 1..23: mol_type = other RNA; note = Description of Artificial Sequence: Synthetic oligonucleotide
  modified_base 1: mod_base = OTHER; note = 2'-O-methyluridine-3'-phosphorothioate
  modified_base 2: mod_base = OTHER; note = 2'-fluoroguanosine-3'-phosphorothioate
  modified_base 3: mod_base = OTHER; note = 2'-O-methylguanosine-3'-phosphate
  modified_base 4: mod_base = OTHER; note = 2'-O-methyluridine-3'-phosphate
  modified_base 5: mod_base = OTHER; note = 2'-O-methyladenosine-3'-phosphate
  modified_base 6: mod_base = OTHER; note = 2'-fluorouridine-3'-phosphate
  modified_base 7: mod_base = OTHER; note = 2'-O-methyladenosine-3'-phosphate
  modified_base 8: mod_base = OTHER; note = 2'-fluoroadenosine-3'-phosphate
  modified_base 9: mod_base = OTHER; note = 2'-fluorocytidine-3'-phosphate
  modified_base 10: mod_base = OTHER; note = 2'-O-methyladenosine-3'-phosphate
  modified_base 11: mod_base = OTHER; note = 2'-O-methylcytidine-3'-phosphate
  modified_base 12: mod_base = OTHER; note = 2'-O-methyluridine-3'-phosphate
  modified_base 13: mod_base = OTHER; note = 2'-O-methyluridine-3'-phosphate
  modified_base 14: mod_base = OTHER; note = 2'-fluoroguanosine-3'-phosphate
  modified_base 15: mod_base = OTHER; note = 2'-O-methylguanosine-3'-phosphate
  modified_base 16: mod_base = OTHER; note = 2'-fluoroadenosine-3'-phosphate
  modified_base 17: mod_base = OTHER; note = 2'-O-methyluridine-3'-phosphate
  modified_base 18: mod_base = OTHER; note = 2'-O-methyladenosine-3'-phosphate
  modified_base 19: mod_base = OTHER; note = 2'-O-methylguanosine-3'-phosphate
  modified_base 20: mod_base = OTHER; note = 2'-O-methyluridine-3'-phosphate
  modified_base 21: mod_base = OTHER; note = 2'-O-methyluridine-3'-phosphorothioate
  modified_base 22: mod_base = OTHER; note = 2'-O-methylguanosine-3'-phosphorothioate
  modified_base 23: mod_base = OTHER; note = 2'-O-methylguanosine-3'-phosphate
tggtataacacttggatagttgg

SEQ ID NO: 3783 - RNA, 23 nt, synthetic construct
  source 1..23: mol_type = other RNA; note = Description of Artificial Sequence: Synthetic oligonucleotide
  modified_base 1: mod_base = OTHER; note = 2'-O-methyluridine-3'-phosphorothioate
  modified_base 2: mod_base = OTHER; note = 2'-fluoroadenosine-3'-phosphorothioate
  modified_base 3: mod_base = OTHER; note = 2'-O-methyladenosine-3'-phosphate
  modified_base 4: mod_base = OTHER; note = 2'-O-methyluridine-3'-phosphate
  modified_base 5: mod_base = OTHER; note = 2'-O-methylcytidine-3'-phosphate
  modified_base 6: mod_base = OTHER; note = 2'-fluorouridine-3'-phosphate
  modified_base 7: mod_base = OTHER; note = 2'-O-methyluridine-3'-phosphate
  modified_base 8: mod_base = OTHER; note = 2'-fluorouridine-3'-phosphate
  modified_base 9: mod_base = OTHER; note = 2'-fluoroguanosine-3'-phosphate
  modified_base 10: mod_base = OTHER; note = 2'-O-methylguanosine-3'-phosphate
  modified_base 11: mod_base = OTHER; note = 2'-O-methyluridine-3'-phosphate
  modified_base 12: mod_base = OTHER; note = 2'-O-methylguanosine-3'-phosphate
  modified_base 13: mod_base = OTHER; note = 2'-O-methyluridine-3'-phosphate
  modified_base 14: mod_base = OTHER; note = 2'-fluorouridine-3'-phosphate
  modified_base 15: mod_base = OTHER; note = 2'-O-methylcytidine-3'-phosphate
  modified_base 16: mod_base = OTHER; note = 2'-fluorouridine-3'-phosphate
  modified_base 17: mod_base = OTHER; note = 2'-O-methyladenosine-3'-phosphate
  modified_base 18: mod_base = OTHER; note = 2'-O-methyladenosine-3'-phosphate
  modified_base 19: mod_base = OTHER; note = 2'-O-methylguanosine-3'-phosphate
  modified_base 20: mod_base = OTHER; note = 2'-O-methylguanosine-3'-phosphate
  modified_base 21: mod_base = OTHER; note = 2'-O-methyladenosine-3'-phosphorothioate
  modified_base 22: mod_base = OTHER; note = 2'-O-methyladenosine-3'-phosphorothioate
  modified_base 23: mod_base = OTHER; note = 2'-O-methyladenosine-3'-phosphate
taatctttggtgttctaaggaaa

SEQ ID NO: 3784 - RNA, 23 nt, synthetic construct
  source 1..23: mol_type = other RNA; note = Description of Artificial Sequence: Synthetic oligonucleotide
  modified_base 1: mod_base = OTHER; note = 2'-O-methyladenosine-3'-phosphorothioate
  modified_base 2: mod_base = OTHER; note = 2'-fluoroguanosine-3'-phosphorothioate
  modified_base 3: mod_base = OTHER; note = 2'-O-methyladenosine-3'-phosphate
  modified_base 4: mod_base = OTHER; note = 2'-O-methylcytidine-3'-phosphate
  modified_base 5: mod_base = OTHER; note = 2'-O-methyluridine-3'-phosphate
  modified_base 6: mod_base = OTHER; note = 2'-fluoroadenosine-3'-phosphate
  modified_base 7: mod_base = OTHER; note = 2'-O-methylcytidine-3'-phosphate
  modified_base 8: mod_base = OTHER; note = 2'-fluoroadenosine-3'-phosphate
  modified_base 9: mod_base = OTHER; note = 2'-fluorocytidine-3'-phosphate
  modified_base 10: mod_base = OTHER; note = 2'-O-methyladenosine-3'-phosphate
  modified_base 11: mod_base = OTHER; note = 2'-O-methyladenosine-3'-phosphate
  modified_base 12: mod_base = OTHER; note = 2'-O-methylguanosine-3'-phosphate
  modified_base 13: mod_base = OTHER; note = 2'-O-methyladenosine-3'-phosphate
  modified_base 14: mod_base = OTHER; note = 2'-fluorouridine-3'-phosphate
  modified_base 15: mod_base = OTHER; note = 2'-O-methyluridine-3'-phosphate
  modified_base 16: mod_base = OTHER; note = 2'-fluoroadenosine-3'-phosphate
  modified_base 17: mod_base = OTHER; note = 2'-O-methyladenosine-3'-phosphate
  modified_base 18: mod_base = OTHER; note = 2'-O-methyluridine-3'-phosphate
  modified_base 19: mod_base = OTHER; note = 2'-O-methyladenosine-3'-phosphate
  modified_base 20: mod_base = OTHER; note = 2'-O-methylcytidine-3'-phosphate
  modified_base 21: mod_base = OTHER; note = 2'-O-methylcytidine-3'-phosphorothioate
  modified_base 22: mod_base = OTHER; note = 2'-O-methyladenosine-3'-phosphorothioate
  modified_base 23: mod_base = OTHER; note = 2'-O-methyluridine-3'-phosphate
agactacacaagattaataccat

SEQ ID NO: 3785 - RNA, 23 nt, synthetic construct
  source 1..23: mol_type = other RNA; note = Description of Artificial Sequence: Synthetic oligonucleotide
  modified_base 1: mod_base = OTHER; note = 2'-O-methyluridine-3'-phosphorothioate
  modified_base 2: mod_base = OTHER; note = 2'-fluoroguanosine-3'-phosphorothioate
  modified_base 3: mod_base = OTHER; note = 2'-O-methylcytidine-3'-phosphate
  modified_base 4: mod_base = OTHER; note = 2'-O-methyladenosine-3'-phosphate
  modified_base 5: mod_base = OTHER; note = 2'-O-methyluridine-3'-phosphate
  modified_base 6: mod_base = OTHER; note = 2'-fluoroguanosine-3'-phosphate
  modified_base 7: mod_base = OTHER; note = 2'-O-methyluridine-3'-phosphate
  modified_base 8: mod_base = OTHER; note = 2'-fluorouridine-3'-phosphate
  modified_base 9: mod_base = OTHER; note = 2'-fluorocytidine-3'-phosphate
  modified_base 10: mod_base = OTHER; note = 2'-O-methyladenosine-3'-phosphate
  modified_base 11: mod_base = OTHER; note = 2'-O-methylguanosine-3'-phosphate
  modified_base 12: mod_base = OTHER; note = 2'-O-methyluridine-3'-phosphate
  modified_base 13: mod_base = OTHER; note = 2'-O-methylguanosine-3'-phosphate
  modified_base 14: mod_base = OTHER; note = 2'-fluoroadenosine-3'-phosphate
  modified_base 15: mod_base = OTHER; note = 2'-O-methyladenosine-3'-phosphate
  modified_base 16: mod_base = OTHER; note = 2'-fluoroguanosine-3'-phosphate
  modified_base 17: mod_base = OTHER; note = 2'-O-methylguanosine-3'-phosphate
  modified_base 18: mod_base = OTHER; note = 2'-O-methyladenosine-3'-phosphate
  modified_base 19: mod_base = OTHER; note = 2'-O-methylguanosine-3'-phosphate
  modified_base 20: mod_base = OTHER; note = 2'-O-methylcytidine-3'-phosphate
  modified_base 21: mod_base = OTHER; note = 2'-O-methylcytidine-3'-phosphorothioate
  modified_base 22: mod_base = OTHER; note = 2'-O-methyladenosine-3'-phosphorothioate
  modified_base 23: mod_base = OTHER; note = 2'-O-methylguanosine-3'-phosphate
tgcatgttcagtgaaggagccag

SEQ ID NO: 3786 - RNA, 23 nt, synthetic construct
  source 1..23: mol_type = other RNA; note = Description of Artificial Sequence: Synthetic oligonucleotide
  modified_base 1: mod_base = OTHER; note = 2'-O-methyluridine-3'-phosphorothioate
  modified_base 2: mod_base = OTHER; note = 2'-fluoroguanosine-3'-phosphorothioate
  modified_base 3: mod_base = OTHER; note = 2'-O-methylguanosine-3'-phosphate
  modified_base 4: mod_base = OTHER; note = 2'-O-methyluridine-3'-phosphate
  modified_base 5: mod_base = OTHER; note = 2'-O-methyladenosine-3'-phosphate
  modified_base 6: mod_base = OTHER; note = 2'-fluoroadenosine-3'-phosphate
  modified_base 7: mod_base = OTHER; note = 2'-O-methyluridine-3'-phosphate
  modified_base 8: mod_base = OTHER; note = 2'-fluoroguanosine-3'-phosphate
  modified_base 9: mod_base = OTHER; note = 2'-fluorouridine-3'-phosphate
  modified_base 10: mod_base = OTHER; note = 2'-O-methyladenosine-3'-phosphate
  modified_base 11: mod_base = OTHER; note = 2'-O-methylcytidine-3'-phosphate
  modified_base 12: mod_base = OTHER; note = 2'-O-methyladenosine-3'-phosphate
  modified_base 13: mod_base = OTHER; note = 2'-O-methylcytidine-3'-phosphate
  modified_base 14: mod_base = OTHER; note = 2'-fluorouridine-3'-phosphate
  modified_base 15: mod_base = OTHER; note = 2'-O-methyladenosine-3'-phosphate
  modified_base 16: mod_base = OTHER; note = 2'-fluorocytidine-3'-phosphate
  modified_base 17: mod_base = OTHER; note = 2'-O-methyluridine-3'-phosphate
  modified_base 18: mod_base = OTHER; note = 2'-O-methylguanosine-3'-phosphate
  modified_base 19: mod_base = OTHER; note = 2'-O-methyladenosine-3'-phosphate
  modified_base 20: mod_base = OTHER; note = 2'-O-methyluridine-3'-phosphate
  modified_base 21: mod_base = OTHER; note = 2'-O-methyladenosine-3'-phosphorothioate
  modified_base 22: mod_base = OTHER; note = 2'-O-methyluridine-3'-phosphorothioate
  modified_base 23: mod_base = OTHER; note = 2'-O-methyladenosine-3'-phosphate
tggtaatgtacactactgatata

SEQ ID NO: 3787 - RNA, 23 nt, synthetic construct
  source 1..23: mol_type = other RNA; note = Description of Artificial Sequence: Synthetic oligonucleotide
  modified_base 1: mod_base = OTHER; note = 2'-O-methyluridine-3'-phosphorothioate
  modified_base 2: mod_base = OTHER; note = 2'-fluoroguanosine-3'-phosphorothioate
  modified_base 3: mod_base = OTHER; note = 2'-O-methyluridine-3'-phosphate
  modified_base 4: mod_base = OTHER; note = 2'-O-methylguanosine-3'-phosphate
  modified_base 5: mod_base = OTHER; note = 2'-O-methyluridine-3'-phosphate
  modified_base 6: mod_base = OTHER; note = 2'-fluorouridine-3'-phosphate
  modified_base 7: mod_base = OTHER; note = 2'-O-methylcytidine-3'-phosphate
  modified_base 8: mod_base = OTHER; note = 2'-fluorouridine-3'-phosphate
  modified_base 9: mod_base = OTHER; note = 2'-fluoroadenosine-3'-phosphate
  modified_base 10: mod_base = OTHER; note = 2'-O-methyladenosine-3'-phosphate
  modified_base 11: mod_base = OTHER; note = 2'-O-methylguanosine-3'-phosphate
  modified_base 12: mod_base = OTHER; note = 2'-O-methylguanosine-3'-phosphate
  modified_base 13: mod_base = OTHER; note = 2'-O-methyladenosine-3'-phosphate
  modified_base 14: mod_base = OTHER; note = 2'-fluoroadenosine-3'-phosphate
  modified_base 15: mod_base = OTHER; note = 2'-O-methyladenosine-3'-phosphate
  modified_base 16: mod_base = OTHER; note = 2'-fluoroadenosine-3'-phosphate
  modified_base 17: mod_base = OTHER; note = 2'-O-methylguanosine-3'-phosphate
  modified_base 18: mod_base = OTHER; note = 2'-O-methylguanosine-3'-phosphate
  modified_base 19: mod_base = OTHER; note = 2'-O-methylcytidine-3'-phosphate
  modified_base 20: mod_base = OTHER; note = 2'-O-methyluridine-3'-phosphate
  modified_base 21: mod_base = OTHER; note = 2'-O-methylguanosine-3'-phosphorothioate
  modified_base 22: mod_base = OTHER; note = 2'-O-methylcytidine-3'-phosphorothioate
  modified_base 23: mod_base = OTHER; note = 2'-O-methylcytidine-3'-phosphate
tgtgttctaaggaaaaggctgcc

SEQ ID NO: 3788 - RNA, 23 nt, synthetic construct
  source 1..23: mol_type = other RNA; note = Description of Artificial Sequence: Synthetic oligonucleotide
  modified_base 1: mod_base = OTHER; note = 2'-O-methyluridine-3'-phosphorothioate
  modified_base 2: mod_base = OTHER; note = 2'-fluoroadenosine-3'-phosphorothioate
  modified_base 3: mod_base = OTHER; note = 2'-O-methyladenosine-3'-phosphate
  modified_base 4: mod_base = OTHER; note = 2'-O-methylcytidine-3'-phosphate
  modified_base 5: mod_base = OTHER; note = 2'-O-methyluridine-3'-phosphate
  modified_base 6: mod_base = OTHER; note = 2'-fluoroadenosine-3'-phosphate
  modified_base 7: mod_base = OTHER; note = 2'-O-methyluridine-3'-phosphate
  modified_base 8: mod_base = OTHER; note = 2'-fluorouridine-3'-phosphate
  modified_base 9: mod_base = OTHER; note = 2'-fluorouridine-3'-phosphate
  modified_base 10: mod_base = OTHER; note = 2'-O-methylcytidine-3'-phosphate
  modified_base 11: mod_base = OTHER; note = 2'-O-methyladenosine-3'-phosphate
  modified_base 12: mod_base = OTHER; note = 2'-O-methylcytidine-3'-phosphate
  modified_base 13: mod_base = OTHER; note = 2'-O-methyladenosine-3'-phosphate
  modified_base 14: mod_base = OTHER; note = 2'-fluorocytidine-3'-phosphate
  modified_base 15: mod_base = OTHER; note = 2'-O-methyluridine-3'-phosphate
  modified_base 16: mod_base = OTHER; note = 2'-fluoroadenosine-3'-phosphate
  modified_base 17: mod_base = OTHER; note = 2'-O-methyladenosine-3'-phosphate
  modified_base 18: mod_base = OTHER; note = 2'-O-methylcytidine-3'-phosphate
  modified_base 19: mod_base = OTHER; note = 2'-O-methylcytidine-3'-phosphate
  modified_base 20: mod_base = OTHER; note = 2'-O-methyladenosine-3'-phosphate
  modified_base 21: mod_base = OTHER; note = 2'-O-methylguanosine-3'-phosphorothioate
  modified_base 22: mod_base = OTHER; note = 2'-O-methyluridine-3'-phosphorothioate
  modified_base 23: mod_base = OTHER; note = 2'-O-methyluridine-3'-phosphate
taactatttcacactaaccagtt

SEQ ID NO: 3789 - RNA, 23 nt, synthetic construct
  source 1..23: mol_type = other RNA; note = Description of Artificial Sequence: Synthetic oligonucleotide
  modified_base 1: mod_base = OTHER; note = 2'-O-methyladenosine-3'-phosphorothioate
  modified_base 2: mod_base = OTHER; note = 2'-fluoroadenosine-3'-phosphorothioate
  modified_base 3: mod_base = OTHER; note = 2'-O-methyluridine-3'-phosphate
  modified_base 4: mod_base = OTHER; note = 2'-O-methylguanosine-3'-phosphate
  modified_base 5: mod_base = OTHER; note = 2'-O-methyluridine-3'-phosphate
  modified_base 6: mod_base = OTHER; note = 2'-fluoroadenosine-3'-phosphate
  modified_base 7: mod_base = OTHER; note = 2'-O-methylcytidine-3'-phosphate
  modified_base 8: mod_base = OTHER; note = 2'-fluoroadenosine-3'-phosphate
  modified_base 9: mod_base = OTHER; note = 2'-fluorocytidine-3'-phosphate
  modified_base 10: mod_base = OTHER; note = 2'-O-methyluridine-3'-phosphate
  modified_base 11: mod_base = OTHER; note = 2'-O-methyladenosine-3'-phosphate
  modified_base 12: mod_base = OTHER; note = 2'-O-methylcytidine-3'-phosphate
  modified_base 13: mod_base = OTHER; note = 2'-O-methyluridine-3'-phosphate
  modified_base 14: mod_base = OTHER; note = 2'-fluoroguanosine-3'-phosphate
  modified_base 15: mod_base = OTHER; note = 2'-O-methyladenosine-3'-phosphate
  modified_base 16: mod_base = OTHER; note = 2'-fluorouridine-3'-phosphate
  modified_base 17: mod_base = OTHER; note = 2'-O-methyladenosine-3'-phosphate
  modified_base 18: mod_base = OTHER; note = 2'-O-methyluridine-3'-phosphate
  modified_base 19: mod_base = OTHER; note = 2'-O-methyladenosine-3'-phosphate
  modified_base 20: mod_base = OTHER; note = 2'-O-methylguanosine-3'-phosphate
  modified_base 21: mod_base = OTHER; note = 2'-O-methyluridine-3'-phosphorothioate
  modified_base 22: mod_base = OTHER; note = 2'-O-methyluridine-3'-phosphorothioate
  modified_base 23: mod_base = OTHER; note = 2'-O-methylcytidine-3'-phosphate
aatgtacactactgatatagttc

SEQ ID NO: 3790 - RNA, 23 nt, synthetic construct
  source 1..23: mol_type = other RNA; note = Description of Artificial Sequence: Synthetic oligonucleotide
  modified_base 1: mod_base = OTHER; note = 2'-O-methyluridine-3'-phosphorothioate
  modified_base 2: mod_base = OTHER; note = 2'-fluorouridine -3'-phosphorothioate
  modified_base 3: mod_base = OTHER; note = 2'-O-methyladenosine-3'-phosphate
  modified_base 4: mod_base = OTHER; note = 2'-O-methyladenosine-3'-phosphate
  modified_base 5: mod_base = OTHER; note = 2'-O-methyluridine-3'-phosphate
  modified_base 6: mod_base = OTHER; note = 2'-fluoroguanosine-3'-phosphate
  modified_base 7: mod_base = OTHER; note = 2'-O-methyluridine-3'-phosphate
  modified_base 8: mod_base = OTHER; note = 2'-fluoroadenosine-3'-phosphate
  modified_base 9: mod_base = OTHER; note = 2'-fluorocytidine-3'-phosphate
  modified_base 10: mod_base = OTHER; note = 2'-O-methyladenosine-3'-phosphate
  modified_base 11: mod_base = OTHER; note = 2'-O-methylcytidine-3'-phosphate
  modified_base 12: mod_base = OTHER; note = 2'-O-methyluridine-3'-phosphate
  modified_base 13: mod_base = OTHER; note = 2'-O-methyladenosine-3'-phosphate
  modified_base 14: mod_base = OTHER; note = 2'-fluorocytidine-3'-phosphate
  modified_base 15: mod_base = OTHER; note = 2'-O-methyluridine-3'-phosphate
  modified_base 16: mod_base = OTHER; note = 2'-fluoroguanosine-3'-phosphate
  modified_base 17: mod_base = OTHER; note = 2'-O-methyladenosine-3'-phosphate
  modified_base 18: mod_base = OTHER; note = 2'-O-methyluridine-3'-phosphate
  modified_base 19: mod_base = OTHER; note = 2'-O-methyladenosine-3'-phosphate
  modified_base 20: mod_base = OTHER; note = 2'-O-methyluridine-3'-phosphate
  modified_base 21: mod_base = OTHER; note = 2'-O-methyladenosine-3'-phosphorothioate
  modified_base 22: mod_base = OTHER; note = 2'-O-methylguanosine-3'-phosphorothioate
  modified_base 23: mod_base = OTHER; note = 2'-O-methyluridine-3'-phosphate
ttaatgtacactactgatatagt

SEQ ID NO: 3791 - RNA, 23 nt, synthetic construct
  source 1..23: mol_type = other RNA; note = Description of Artificial Sequence: Synthetic oligonucleotide
  modified_base 1: mod_base = OTHER; note = 2'-O-methyluridine-3'-phosphorothioate
  modified_base 2: mod_base = OTHER; note = 2'-fluoroadenosine-3'-phosphorothioate
  modified_base 3: mod_base = OTHER; note = 2'-O-methylguanosine-3'-phosphate
  modified_base 4: mod_base = OTHER; note = 2'-O-methyluridine-3'-phosphate
  modified_base 5: mod_base = OTHER; note = 2'-O-methylcytidine-3'-phosphate
  modified_base 6: mod_base = OTHER; note = 2'-fluorocytidine-3'-phosphate
  modified_base 7: mod_base = OTHER; note = 2'-O-methyladenosine-3'-phosphate
  modified_base 8: mod_base = OTHER; note = 2'-fluorouridine-3'-phosphate
  modified_base 9: mod_base = OTHER; note = 2'-fluorocytidine-3'-phosphate
  modified_base 10: mod_base = OTHER; note = 2'-O-methyluridine-3'-phosphate
  modified_base 11: mod_base = OTHER; note = 2'-O-methyluridine-3'-phosphate
  modified_base 12: mod_base = OTHER; note = 2'-O-methyladenosine-3'-phosphate
  modified_base 13: mod_base = OTHER; note = 2'-O-methyladenosine-3'-phosphate
  modified_base 14: mod_base = OTHER; note = 2'-fluoroadenosine-3'-phosphate
  modified_base 15: mod_base = OTHER; note = 2'-O-methyladenosine-3'-phosphate
  modified_base 16: mod_base = OTHER; note = 2'-fluorouridine-3'-phosphate
  modified_base 17: mod_base = OTHER; note = 2'-O-methyladenosine-3'-phosphate
  modified_base 18: mod_base = OTHER; note = 2'-O-methyluridine-3'-phosphate
  modified_base 19: mod_base = OTHER; note = 2'-O-methyluridine-3'-phosphate
  modified_base 20: mod_base = OTHER; note = 2'-O-methyladenosine-3'-phosphate
  modified_base 21: mod_base = OTHER; note = 2'-O-methylcytidine-3'-phosphorothioate
  modified_base 22: mod_base = OTHER; note = 2'-O-methyluridine-3'-phosphorothioate
  modified_base 23: mod_base = OTHER; note = 2'-O-methylguanosine-3'-phosphate
tagtccatcttaaaatattactg

SEQ ID NO: 3792 - RNA, 23 nt, synthetic construct
  source 1..23: mol_type = other RNA; note = Description of Artificial Sequence: Synthetic oligonucleotide
  modified_base 1: mod_base = OTHER; note = 2'-O-methyluridine-3'-phosphorothioate
  modified_base 2: mod_base = OTHER; note = 2'-fluorouridine -3'-phosphorothioate
  modified_base 3: mod_base = OTHER; note = 2'-O-methyluridine-3'-phosphate
  modified_base 4: mod_base = OTHER; note = 2'-O-methyluridine-3'-phosphate
  modified_base 5: mod_base = OTHER; note = 2'-O-methylcytidine-3'-phosphate
  modified_base 6: mod_base = OTHER; note = 2'-fluorocytidine-3'-phosphate
  modified_base 7: mod_base = OTHER; note = 2'-O-methylcytidine-3'-phosphate
  modified_base 8: mod_base = OTHER; note = 2'-fluoroadenosine-3'-phosphate
  modified_base 9: mod_base = OTHER; note = 2'-fluoroguanosine-3'-phosphate
  modified_base 10: mod_base = OTHER; note = 2'-O-methyluridine-3'-phosphate
  modified_base 11: mod_base = OTHER; note = 2'-O-methylcytidine-3'-phosphate
  modified_base 12: mod_base = OTHER; note = 2'-O-methylcytidine-3'-phosphate
  modified_base 13: mod_base = OTHER; note = 2'-O-methyladenosine-3'-phosphate
  modified_base 14: mod_base = OTHER; note = 2'-fluorouridine-3'-phosphate
  modified_base 15: mod_base = OTHER; note = 2'-O-methylcytidine-3'-phosphate
  modified_base 16: mod_base = OTHER; note = 2'-fluorouridine-3'-phosphate
  modified_base 17: mod_base = OTHER; note = 2'-O-methyluridine-3'-phosphate
  modified_base 18: mod_base = OTHER; note = 2'-O-methyladenosine-3'-phosphate
  modified_base 19: mod_base = OTHER; note = 2'-O-methyladenosine-3'-phosphate
  modified_base 20: mod_base = OTHER; note = 2'-O-methyladenosine-3'-phosphate
  modified_base 21: mod_base = OTHER; note = 2'-O-methyladenosine-3'-phosphorothioate
  modified_base 22: mod_base = OTHER; note = 2'-O-methyluridine-3'-phosphorothioate
  modified_base 23: mod_base = OTHER; note = 2'-O-methyladenosine-3'-phosphate
ttttcccagtccatcttaaaata

SEQ ID NO: 3793 - RNA, 23 nt, synthetic construct
  source 1..23: mol_type = other RNA; note = Description of Artificial Sequence: Synthetic oligonucleotide
  modified_base 1: mod_base = OTHER; note = 2'-O-methyladenosine-3'-phosphorothioate
  modified_base 2: mod_base = OTHER; note = 2'-fluoroguanosine-3'-phosphorothioate
  modified_base 3: mod_base = OTHER; note = 2'-O-methyladenosine-3'-phosphate
  modified_base 4: mod_base = OTHER; note = 2'-O-methyladenosine-3'-phosphate
  modified_base 5: mod_base = OTHER; note = 2'-O-methylcytidine-3'-phosphate
  modified_base 6: mod_base = OTHER; note = 2'-fluorouridine-3'-phosphate
  modified_base 7: mod_base = OTHER; note = 2'-O-methyladenosine-3'-phosphate
  modified_base 8: mod_base = OTHER; note = 2'-fluorouridine-3'-phosphate
  modified_base 9: mod_base = OTHER; note = 2'-fluorouridine-3'-phosphate
  modified_base 10: mod_base = OTHER; note = 2'-O-methyluridine-3'-phosphate
  modified_base 11: mod_base = OTHER; note = 2'-O-methylcytidine-3'-phosphate
  modified_base 12: mod_base = OTHER; note = 2'-O-methyladenosine-3'-phosphate
  modified_base 13: mod_base = OTHER; note = 2'-O-methylcytidine-3'-phosphate
  modified_base 14: mod_base = OTHER; note = 2'-fluoroadenosine-3'-phosphate
  modified_base 15: mod_base = OTHER; note = 2'-O-methylcytidine-3'-phosphate
  modified_base 16: mod_base = OTHER; note = 2'-fluorouridine-3'-phosphate
  modified_base 17: mod_base = OTHER; note = 2'-O-methyladenosine-3'-phosphate
  modified_base 18: mod_base = OTHER; note = 2'-O-methyladenosine-3'-phosphate
  modified_base 19: mod_base = OTHER; note = 2'-O-methylcytidine-3'-phosphate
  modified_base 20: mod_base = OTHER; note = 2'-O-methylcytidine-3'-phosphate
  modified_base 21: mod_base = OTHER; note = 2'-O-methyladenosine-3'-phosphorothioate
  modified_base 22: mod_base = OTHER; note = 2'-O-methylguanosine-3'-phosphorothioate
  modified_base 23: mod_base = OTHER; note = 2'-O-methyluridine-3'-phosphate
agaactatttcacactaaccagt

SEQ ID NO: 3794 - RNA, 23 nt, synthetic construct
  source 1..23: mol_type = other RNA; note = Description of Artificial Sequence: Synthetic oligonucleotide
  modified_base 1: mod_base = OTHER; note = 2'-O-methyluridine-3'-phosphorothioate
  modified_base 2: mod_base = OTHER; note = 2'-fluoroguanosine-3'-phosphorothioate
  modified_base 3: mod_base = OTHER; note = 2'-O-methyladenosine-3'-phosphate
  modified_base 4: mod_base = OTHER; note = 2'-O-methylcytidine-3'-phosphate
  modified_base 5: mod_base = OTHER; note = 2'-O-methyluridine-3'-phosphate
  modified_base 6: mod_base = OTHER; note = 2'-fluoroadenosine-3'-phosphate
  modified_base 7: mod_base = OTHER; note = 2'-O-methylguanosine-3'-phosphate
  modified_base 8: mod_base = OTHER; note = 2'-fluoroguanosine-3'-phosphate
  modified_base 9: mod_base = OTHER; note = 2'-fluorocytidine-3'-phosphate
  modified_base 10: mod_base = OTHER; note = 2'-O-methyladenosine-3'-phosphate
  modified_base 11: mod_base = OTHER; note = 2'-O-methyluridine-3'-phosphate
  modified_base 12: mod_base = OTHER; note = 2'-O-methylguanosine-3'-phosphate
  modified_base 13: mod_base = OTHER; note = 2'-O-methyluridine-3'-phosphate
  modified_base 14: mod_base = OTHER; note = 2'-fluorouridine-3'-phosphate
  modified_base 15: mod_base = OTHER; note = 2'-O-methylcytidine-3'-phosphate
  modified_base 16: mod_base = OTHER; note = 2'-fluoroadenosine-3'-phosphate
  modified_base 17: mod_base = OTHER; note = 2'-O-methylguanosine-3'-phosphate
  modified_base 18: mod_base = OTHER; note = 2'-O-methyluridine-3'-phosphate
  modified_base 19: mod_base = OTHER; note = 2'-O-methylguanosine-3'-phosphate
  modified_base 20: mod_base = OTHER; note = 2'-O-methyladenosine-3'-phosphate
  modified_base 21: mod_base = OTHER; note = 2'-O-methyladenosine-3'-phosphorothioate
  modified_base 22: mod_base = OTHER; note = 2'-O-methylguanosine-3'-phosphorothioate
  modified_base 23: mod_base = OTHER; note = 2'-O-methylguanosine-3'-phosphate
tgactaggcatgttcagtgaagg

SEQ ID NO: 3795 - RNA, 23 nt, synthetic construct
  source 1..23: mol_type = other RNA; note = Description of Artificial Sequence: Synthetic oligonucleotide
  modified_base 1: mod_base = OTHER; note = 2'-O-methyluridine-3'-phosphorothioate
  modified_base 2: mod_base = OTHER; note = 2'-fluoroadenosine-3'-phosphorothioate
  modified_base 3: mod_base = OTHER; note = 2'-O-methyluridine-3'-phosphate
  modified_base 4: mod_base = OTHER; note = 2'-O-methyladenosine-3'-phosphate
  modified_base 5: mod_base = OTHER; note = 2'-O-methyladenosine-3'-phosphate
  modified_base 6: mod_base = OTHER; note = 2'-fluorocytidine-3'-phosphate
  modified_base 7: mod_base = OTHER; note = 2'-O-methyladenosine-3'-phosphate
  modified_base 8: mod_base = OTHER; note = 2'-fluorocytidine-3'-phosphate
  modified_base 9: mod_base = OTHER; note = 2'-fluorouridine-3'-phosphate
  modified_base 10: mod_base = OTHER; note = 2'-O-methyluridine-3'-phosphate
  modified_base 11: mod_base = OTHER; note = 2'-O-methylguanosine-3'-phosphate
  modified_base 12: mod_base = OTHER; note = 2'-O-methylguanosine-3'-phosphate
  modified_base 13: mod_base = OTHER; note = 2'-O-methyladenosine-3'-phosphate
  modified_base 14: mod_base = OTHER; note = 2'-fluorouridine-3'-phosphate
  modified_base 15: mod_base = OTHER; note = 2'-O-methyladenosine-3'-phosphate
  modified_base 16: mod_base = OTHER; note = 2'-fluoroguanosine-3'-phosphate
  modified_base 17: mod_base = OTHER; note = 2'-O-methyluridine-3'-phosphate
  modified_base 18: mod_base = OTHER; note = 2'-O-methyluridine-3'-phosphate
  modified_base 19: mod_base = OTHER; note = 2'-O-methylguanosine-3'-phosphate
  modified_base 20: mod_base = OTHER; note = 2'-O-methylguanosine-3'-phosphate
  modified_base 21: mod_base = OTHER; note = 2'-O-methyluridine-3'-phosphorothioate
  modified_base 22: mod_base = OTHER; note = 2'-O-methyluridine-3'-phosphorothioate
  modified_base 23: mod_base = OTHER; note = 2'-O-methylguanosine-3'-phosphate
tataacacttggatagttggttg

SEQ ID NO: 3796 - RNA, 23 nt, synthetic construct
  source 1..23: mol_type = other RNA; note = Description of Artificial Sequence: Synthetic oligonucleotide
  modified_base 1: mod_base = OTHER; note = 2'-O-methyluridine-3'-phosphorothioate
  modified_base 2: mod_base = OTHER; note = 2'-fluorouridine -3'-phosphorothioate
  modified_base 3: mod_base = OTHER; note = 2'-O-methyluridine-3'-phosphate
  modified_base 4: mod_base = OTHER; note = 2'-O-methyladenosine-3'-phosphate
  modified_base 5: mod_base = OTHER; note = 2'-O-methylguanosine-3'-phosphate
  modified_base 6: mod_base = OTHER; note = 2'-fluorouridine-3'-phosphate
  modified_base 7: mod_base = OTHER; note = 2'-O-methyluridine-3'-phosphate
  modified_base 8: mod_base = OTHER; note = 2'-fluoroguanosine-3'-phosphate
  modified_base 9: mod_base = OTHER; note = 2'-fluoroguanosine-3'-phosphate
  modified_base 10: mod_base = OTHER; note = 2'-O-methyluridine-3'-phosphate
  modified_base 11: mod_base = OTHER; note = 2'-O-methyladenosine-3'-phosphate
  modified_base 12: mod_base = OTHER; note = 2'-O-methyluridine-3'-phosphate
  modified_base 13: mod_base = OTHER; note = 2'-O-methyladenosine-3'-phosphate
  modified_base 14: mod_base = OTHER; note = 2'-fluoroadenosine-3'-phosphate
  modified_base 15: mod_base = OTHER; note = 2'-O-methylcytidine-3'-phosphate
  modified_base 16: mod_base = OTHER; note = 2'-fluoroadenosine-3'-phosphate
  modified_base 17: mod_base = OTHER; note = 2'-O-methylcytidine-3'-phosphate
  modified_base 18: mod_base = OTHER; note = 2'-O-methyluridine-3'-phosphate
  modified_base 19: mod_base = OTHER; note = 2'-O-methyluridine-3'-phosphate
  modified_base 20: mod_base = OTHER; note = 2'-O-methylguanosine-3'-phosphate
  modified_base 21: mod_base = OTHER; note = 2'-O-methylguanosine-3'-phosphorothioate
  modified_base 22: mod_base = OTHER; note = 2'-O-methyladenosine-3'-phosphorothioate
  modified_base 23: mod_base = OTHER; note = 2'-O-methyluridine-3'-phosphate
tttagttggtataacacttggat

SEQ ID NO: 3797 - RNA, 23 nt, synthetic construct
  source 1..23: mol_type = other RNA; note = Description of Artificial Sequence: Synthetic oligonucleotide
  modified_base 1: mod_base = OTHER; note = 2'-O-methyluridine-3'-phosphorothioate
  modified_base 2: mod_base = OTHER; note = 2'-fluoroguanosine-3'-phosphorothioate
  modified_base 3: mod_base = OTHER; note = 2'-O-methylguanosine-3'-phosphate
  modified_base 4: mod_base = OTHER; note = 2'-O-methyladenosine-3'-phosphate
  modified_base 5: mod_base = OTHER; note = 2'-O-methylcytidine-3'-phosphate
  modified_base 6: mod_base = OTHER; note = 2'-fluorouridine-3'-phosphate
  modified_base 7: mod_base = OTHER; note = 2'-O-methyluridine-3'-phosphate
  modified_base 8: mod_base = OTHER; note = 2'-fluoroguanosine-3'-phosphate
  modified_base 9: mod_base = OTHER; note = 2'-fluoroguanosine-3'-phosphate
  modified_base 10: mod_base = OTHER; note = 2'-O-methyladenosine-3'-phosphate
  modified_base 11: mod_base = OTHER; note = 2'-O-methyladenosine-3'-phosphate
  modified_base 12: mod_base = OTHER; note = 2'-O-methylcytidine-3'-phosphate
  modified_base 13: mod_base = OTHER; note = 2'-O-methylcytidine-3'-phosphate
  modified_base 14: mod_base = OTHER; note = 2'-fluoroadenosine-3'-phosphate
  modified_base 15: mod_base = OTHER; note = 2'-O-methyladenosine-3'-phosphate
  modified_base 16: mod_base = OTHER; note = 2'-fluoroadenosine-3'-phosphate
  modified_base 17: mod_base = OTHER; note = 2'-O-methyladenosine-3'-phosphate
  modified_base 18: mod_base = OTHER; note = 2'-O-methylguanosine-3'-phosphate
  modified_base 19: mod_base = OTHER; note = 2'-O-methylguanosine-3'-phosphate
  modified_base 20: mod_base = OTHER; note = 2'-O-methyladenosine-3'-phosphate
  modified_base 21: mod_base = OTHER; note = 2'-O-methyladenosine-3'-phosphorothioate
  modified_base 22: mod_base = OTHER; note = 2'-O-methyluridine-3'-phosphorothioate
  modified_base 23: mod_base = OTHER; note = 2'-O-methylcytidine-3'-phosphate
tggacttggaaccaaaaggaatc

SEQ ID NO: 3798 - RNA, 23 nt, synthetic construct
  source 1..23: mol_type = other RNA; note = Description of Artificial Sequence: Synthetic oligonucleotide
  modified_base 1: mod_base = OTHER; note = 2'-O-methyluridine-3'-phosphorothioate
  modified_base 2: mod_base = OTHER; note = 2'-fluorouridine -3'-phosphorothioate
  modified_base 3: mod_base = OTHER; note = 2'-O-methylguanosine-3'-phosphate
  modified_base 4: mod_base = OTHER; note = 2'-O-methyluridine-3'-phosphate
  modified_base 5: mod_base = OTHER; note = 2'-O-methyluridine-3'-phosphate
  modified_base 6: mod_base = OTHER; note = 2'-fluorocytidine-3'-phosphate
  modified_base 7: mod_base = OTHER; note = 2'-O-methyluridine-3'-phosphate
  modified_base 8: mod_base = OTHER; note = 2'-fluoroadenosine-3'-phosphate
  modified_base 9: mod_base = OTHER; note = 2'-fluoroadenosine-3'-phosphate
  modified_base 10: mod_base = OTHER; note = 2'-O-methylguanosine-3'-phosphate
  modified_base 11: mod_base = OTHER; note = 2'-O-methylguanosine-3'-phosphate
  modified_base 12: mod_base = OTHER; note = 2'-O-methyladenosine-3'-phosphate
  modified_base 13: mod_base = OTHER; note = 2'-O-methyladenosine-3'-phosphate
  modified_base 14: mod_base = OTHER; note = 2'-fluoroadenosine-3'-phosphate
  modified_base 15: mod_base = OTHER; note = 2'-O-methyladenosine-3'-phosphate
  modified_base 16: mod_base = OTHER; note = 2'-fluoroguanosine-3'-phosphate
  modified_base 17: mod_base = OTHER; note = 2'-O-methylguanosine-3'-phosphate
  modified_base 18: mod_base = OTHER; note = 2'-O-methylcytidine-3'-phosphate
  modified_base 19: mod_base = OTHER; note = 2'-O-methyluridine-3'-phosphate
  modified_base 20: mod_base = OTHER; note = 2'-O-methylguanosine-3'-phosphate
  modified_base 21: mod_base = OTHER; note = 2'-O-methylcytidine-3'-phosphorothioate
  modified_base 22: mod_base = OTHER; note = 2'-O-methylcytidine-3'-phosphorothioate
  modified_base 23: mod_base = OTHER; note = 2'-O-methyladenosine-3'-phosphate
ttgttctaaggaaaaggctgcca

SEQ ID NO: 3799 - RNA, 23 nt, synthetic construct
  source 1..23: mol_type = other RNA; note = Description of Artificial Sequence: Synthetic oligonucleotide
  modified_base 1: mod_base = OTHER; note = 2'-O-methyladenosine-3'-phosphorothioate
  modified_base 2: mod_base = OTHER; note = 2'-fluoroguanosine-3'-phosphorothioate
  modified_base 3: mod_base = OTHER; note = 2'-O-methyluridine-3'-phosphate
  modified_base 4: mod_base = OTHER; note = 2'-O-methylcytidine-3'-phosphate
  modified_base 5: mod_base = OTHER; note = 2'-O-methylcytidine-3'-phosphate
  modified_base 6: mod_base = OTHER; note = 2'-fluoroadenosine-3'-phosphate
  modified_base 7: mod_base = OTHER; note = 2'-O-methyluridine-3'-phosphate
  modified_base 8: mod_base = OTHER; note = 2'-fluorocytidine-3'-phosphate
  modified_base 9: mod_base = OTHER; note = 2'-fluorouridine-3'-phosphate
  modified_base 10: mod_base = OTHER; note = 2'-O-methyluridine-3'-phosphate
  modified_base 11: mod_base = OTHER; note = 2'-O-methyladenosine-3'-phosphate
  modified_base 12: mod_base = OTHER; note = 2'-O-methyladenosine-3'-phosphate
  modified_base 13: mod_base = OTHER; note = 2'-O-methyladenosine-3'-phosphate
  modified_base 14: mod_base = OTHER; note = 2'-fluoroadenosine-3'-phosphate
  modified_base 15: mod_base = OTHER; note = 2'-O-methyluridine-3'-phosphate
  modified_base 16: mod_base = OTHER; note = 2'-fluoroadenosine-3'-phosphate
  modified_base 17: mod_base = OTHER; note = 2'-O-methyluridine-3'-phosphate
  modified_base 18: mod_base = OTHER; note = 2'-O-methyluridine-3'-phosphate
  modified_base 19: mod_base = OTHER; note = 2'-O-methyladenosine-3'-phosphate
  modified_base 20: mod_base = OTHER; note = 2'-O-methylcytidine-3'-phosphate
  modified_base 21: mod_base = OTHER; note = 2'-O-methyluridine-3'-phosphorothioate
  modified_base 22: mod_base = OTHER; note = 2'-O-methylguanosine-3'-phosphorothioate
  modified_base 23: mod_base = OTHER; note = 2'-O-methylcytidine-3'-phosphate
agtccatcttaaaatattactgc

SEQ ID NO: 3800 - RNA, 23 nt, synthetic construct
  source 1..23: mol_type = other RNA; note = Description of Artificial Sequence: Synthetic oligonucleotide
  modified_base 1: mod_base = OTHER; note = 2'-O-methyluridine-3'-phosphorothioate
  modified_base 2: mod_base = OTHER; note = 2'-fluoroadenosine-3'-phosphorothioate
  modified_base 3: mod_base = OTHER; note = 2'-O-methylguanosine-3'-phosphate
  modified_base 4: mod_base = OTHER; note = 2'-O-methylguanosine-3'-phosphate
  modified_base 5: mod_base = OTHER; note = 2'-O-methyladenosine-3'-phosphate
  modified_base 6: mod_base = OTHER; note = 2'-fluorouridine-3'-phosphate
  modified_base 7: mod_base = OTHER; note = 2'-O-methyladenosine-3'-phosphate
  modified_base 8: mod_base = OTHER; note = 2'-fluorouridine-3'-phosphate
  modified_base 9: mod_base = OTHER; note = 2'-fluoroadenosine-3'-phosphate
  modified_base 10: mod_base = OTHER; note = 2'-O-methylguanosine-3'-phosphate
  modified_base 11: mod_base = OTHER; note = 2'-O-methylcytidine-3'-phosphate
  modified_base 12: mod_base = OTHER; note = 2'-O-methyluridine-3'-phosphate
  modified_base 13: mod_base = OTHER; note = 2'-O-methylguanosine-3'-phosphate
  modified_base 14: mod_base = OTHER; note = 2'-fluorouridine-3'-phosphate
  modified_base 15: mod_base = OTHER; note = 2'-O-methylguanosine-3'-phosphate
  modified_base 16: mod_base = OTHER; note = 2'-fluoroguanosine-3'-phosphate
  modified_base 17: mod_base = OTHER; note = 2'-O-methyladenosine-3'-phosphate
  modified_base 18: mod_base = OTHER; note = 2'-O-methyluridine-3'-phosphate
  modified_base 19: mod_base = OTHER; note = 2'-O-methyluridine-3'-phosphate
  modified_base 20: mod_base = OTHER; note = 2'-O-methyluridine-3'-phosphate
  modified_base 21: mod_base = OTHER; note = 2'-O-methyluridine-3'-phosphorothioate
  modified_base 22: mod_base = OTHER; note = 2'-O-methyladenosine-3'-phosphorothioate
  modified_base 23: mod_base = OTHER; note = 2'-O-methylcytidine-3'-phosphate
taggatatagctgtggattttac

SEQ ID NO: 3801 - RNA, 23 nt, synthetic construct
  source 1..23: mol_type = other RNA; note = Description of Artificial Sequence: Synthetic oligonucleotide
  modified_base 1: mod_base = OTHER; note = 2'-O-methyluridine-3'-phosphorothioate
  modified_base 2: mod_base = OTHER; note = 2'-fluorouridine -3'-phosphorothioate
  modified_base 3: mod_base = OTHER; note = 2'-O-methyladenosine-3'-phosphate
  modified_base 4: mod_base = OTHER; note = 2'-O-methylguanosine-3'-phosphate
  modified_base 5: mod_base = OTHER; note = 2'-O-methylguanosine-3'-phosphate
  modified_base 6: mod_base = OTHER; note = 2'-fluorocytidine-3'-phosphate
  modified_base 7: mod_base = OTHER; note = 2'-O-methyladenosine-3'-phosphate
  modified_base 8: mod_base = OTHER; note = 2'-fluorouridine-3'-phosphate
  modified_base 9: mod_base = OTHER; note = 2'-fluoroguanosine-3'-phosphate
  modified_base 10: mod_base = OTHER; note = 2'-O-methyluridine-3'-phosphate
  modified_base 11: mod_base = OTHER; note = 2'-O-methyluridine-3'-phosphate
  modified_base 12: mod_base = OTHER; note = 2'-O-methylcytidine-3'-phosphate
  modified_base 13: mod_base = OTHER; note = 2'-O-methyladenosine-3'-phosphate
  modified_base 14: mod_base = OTHER; note = 2'-fluoroguanosine-3'-phosphate
  modified_base 15: mod_base = OTHER; note = 2'-O-methyluridine-3'-phosphate
  modified_base 16: mod_base = OTHER; note = 2'-fluoroguanosine-3'-phosphate
  modified_base 17: mod_base = OTHER; note = 2'-O-methyladenosine-3'-phosphate
  modified_base 18: mod_base = OTHER; note = 2'-O-methyladenosine-3'-phosphate
  modified_base 19: mod_base = OTHER; note = 2'-O-methylguanosine-3'-phosphate
  modified_base 20: mod_base = OTHER; note = 2'-O-methylguanosine-3'-phosphate
  modified_base 21: mod_base = OTHER; note = 2'-O-methyladenosine-3'-phosphorothioate
  modified_base 22: mod_base = OTHER; note = 2'-O-methylguanosine-3'-phosphorothioate
  modified_base 23: mod_base = OTHER; note = 2'-O-methylcytidine-3'-phosphate
ttaggcatgttcagtgaaggagc

SEQ ID NO: 3802 - RNA, 23 nt, synthetic construct
  source 1..23: mol_type = other RNA; note = Description of Artificial Sequence: Synthetic oligonucleotide
  modified_base 1: mod_base = OTHER; note = 2'-O-methyluridine-3'-phosphorothioate
  modified_base 2: mod_base = OTHER; note = 2'-fluorouridine -3'-phosphorothioate
  modified_base 3: mod_base = OTHER; note = 2'-O-methylguanosine-3'-phosphate
  modified_base 4: mod_base = OTHER; note = 2'-O-methylguanosine-3'-phosphate
  modified_base 5: mod_base = OTHER; note = 2'-O-methyladenosine-3'-phosphate
  modified_base 6: mod_base = OTHER; note = 2'-fluorocytidine-3'-phosphate
  modified_base 7: mod_base = OTHER; note = 2'-O-methyluridine-3'-phosphate
  modified_base 8: mod_base = OTHER; note = 2'-fluoroadenosine-3'-phosphate
  modified_base 9: mod_base = OTHER; note = 2'-fluoroguanosine-3'-phosphate
  modified_base 10: mod_base = OTHER; note = 2'-O-methylguanosine-3'-phosphate
  modified_base 11: mod_base = OTHER; note = 2'-O-methylcytidine-3'-phosphate
  modified_base 12: mod_base = OTHER; note = 2'-O-methyladenosine-3'-phosphate
  modified_base 13: mod_base = OTHER; note = 2'-O-methyluridine-3'-phosphate
  modified_base 14: mod_base = OTHER; note = 2'-fluoroguanosine-3'-phosphate
  modified_base 15: mod_base = OTHER; note = 2'-O-methyluridine-3'-phosphate
  modified_base 16: mod_base = OTHER; note = 2'-fluorouridine-3'-phosphate
  modified_base 17: mod_base = OTHER; note = 2'-O-methylcytidine-3'-phosphate
  modified_base 18: mod_base = OTHER; note = 2'-O-methyladenosine-3'-phosphate
  modified_base 19: mod_base = OTHER; note = 2'-O-methylguanosine-3'-phosphate
  modified_base 20: mod_base = OTHER; note = 2'-O-methyluridine-3'-phosphate
  modified_base 21: mod_base = OTHER; note = 2'-O-methylguanosine-3'-phosphorothioate
  modified_base 22: mod_base = OTHER; note = 2'-O-methyladenosine-3'-phosphorothioate
  modified_base 23: mod_base = OTHER; note = 2'-O-methyladenosine-3'-phosphate
ttggactaggcatgttcagtgaa

SEQ ID NO: 3803 - RNA, 23 nt, synthetic construct
  source 1..23: mol_type = other RNA; note = Description of Artificial Sequence: Synthetic oligonucleotide
  modified_base 1: mod_base = OTHER; note = 2'-O-methylguanosine-3'-phosphorothioate
  modified_base 2: mod_base = OTHER; note = 2'-fluorouridine -3'-phosphorothioate
  modified_base 3: mod_base = OTHER; note = 2'-O-methyluridine-3'-phosphate
  modified_base 4: mod_base = OTHER; note = 2'-O-methyluridine-3'-phosphate
  modified_base 5: mod_base = OTHER; note = 2'-O-methyluridine-3'-phosphate
  modified_base 6: mod_base = OTHER; note = 2'-fluoroadenosine-3'-phosphate
  modified_base 7: mod_base = OTHER; note = 2'-O-methylguanosine-3'-phosphate
  modified_base 8: mod_base = OTHER; note = 2'-fluorouridine-3'-phosphate
  modified_base 9: mod_base = OTHER; note = 2'-fluorouridine-3'-phosphate
  modified_base 10: mod_base = OTHER; note = 2'-O-methylguanosine-3'-phosphate
  modified_base 11: mod_base = OTHER; note = 2'-O-methylguanosine-3'-phosphate
  modified_base 12: mod_base = OTHER; note = 2'-O-methyluridine-3'-phosphate
  modified_base 13: mod_base = OTHER; note = 2'-O-methyladenosine-3'-phosphate
  modified_base 14: mod_base = OTHER; note = 2'-fluorouridine-3'-phosphate
  modified_base 15: mod_base = OTHER; note = 2'-O-methyladenosine-3'-phosphate
  modified_base 16: mod_base = OTHER; note = 2'-fluoroadenosine-3'-phosphate
  modified_base 17: mod_base = OTHER; note = 2'-O-methylcytidine-3'-phosphate
  modified_base 18: mod_base = OTHER; note = 2'-O-methyladenosine-3'-phosphate
  modified_base 19: mod_base = OTHER; note = 2'-O-methylcytidine-3'-phosphate
  modified_base 20: mod_base = OTHER; note = 2'-O-methyluridine-3'-phosphate
  modified_base 21: mod_base = OTHER; note = 2'-O-methyluridine-3'-phosphorothioate
  modified_base 22: mod_base = OTHER; note = 2'-O-methylguanosine-3'-phosphorothioate
  modified_base 23: mod_base = OTHER; note = 2'-O-methylguanosine-3'-phosphate
gttttagttggtataacacttgg

SEQ ID NO: 3804 - RNA, 23 nt, synthetic construct
  source 1..23: mol_type = other RNA; note = Description of Artificial Sequence: Synthetic oligonucleotide
  modified_base 1: mod_base = OTHER; note = 2'-O-methyladenosine-3'-phosphorothioate
  modified_base 2: mod_base = OTHER; note = 2'-fluoroguanosine-3'-phosphorothioate
  modified_base 3: mod_base = OTHER; note = 2'-O-methyladenosine-3'-phosphate
  modified_base 4: mod_base = OTHER; note = 2'-O-methylcytidine-3'-phosphate
  modified_base 5: mod_base = OTHER; note = 2'-O-methylcytidine-3'-phosphate
  modified_base 6: mod_base = OTHER; note = 2'-fluorocytidine-3'-phosphate
  modified_base 7: mod_base = OTHER; note = 2'-O-methyluridine-3'-phosphate
  modified_base 8: mod_base = OTHER; note = 2'-fluorouridine-3'-phosphate
  modified_base 9: mod_base = OTHER; note = 2'-fluoroadenosine-3'-phosphate
  modified_base 10: mod_base = OTHER; note = 2'-O-methyladenosine-3'-phosphate
  modified_base 11: mod_base = OTHER; note = 2'-O-methyluridine-3'-phosphate
  modified_base 12: mod_base = OTHER; note = 2'-O-methylcytidine-3'-phosphate
  modified_base 13: mod_base = OTHER; note = 2'-O-methyladenosine-3'-phosphate
  modified_base 14: mod_base = OTHER; note = 2'-fluorouridine-3'-phosphate
  modified_base 15: mod_base = OTHER; note = 2'-O-methylguanosine-3'-phosphate
  modified_base 16: mod_base = OTHER; note = 2'-fluoroguanosine-3'-phosphate
  modified_base 17: mod_base = OTHER; note = 2'-O-methyluridine-3'-phosphate
  modified_base 18: mod_base = OTHER; note = 2'-O-methylguanosine-3'-phosphate
  modified_base 19: mod_base = OTHER; note = 2'-O-methylguanosine-3'-phosphate
  modified_base 20: mod_base = OTHER; note = 2'-O-methyladenosine-3'-phosphate
  modified_base 21: mod_base = OTHER; note = 2'-O-methyladenosine-3'-phosphorothioate
  modified_base 22: mod_base = OTHER; note = 2'-O-methyladenosine-3'-phosphorothioate
  modified_base 23: mod_base = OTHER; note = 2'-O-methylcytidine-3'-phosphate
agacccttaatcatggtggaaac

SEQ ID NO: 3805 - RNA, 23 nt, synthetic construct
  source 1..23: mol_type = other RNA; note = Description of Artificial Sequence: Synthetic oligonucleotide
  modified_base 1: mod_base = OTHER; note = 2'-O-methyladenosine-3'-phosphorothioate
  modified_base 2: mod_base = OTHER; note = 2'-fluoroadenosine-3'-phosphorothioate
  modified_base 3: mod_base = OTHER; note = 2'-O-methyluridine-3'-phosphate
  modified_base 4: mod_base = OTHER; note = 2'-O-methylguanosine-3'-phosphate
  modified_base 5: mod_base = OTHER; note = 2'-O-methyluridine-3'-phosphate
  modified_base 6: mod_base = OTHER; note = 2'-fluorouridine-3'-phosphate
  modified_base 7: mod_base = OTHER; note = 2'-O-methylguanosine-3'-phosphate
  modified_base 8: mod_base = OTHER; note = 2'-fluoroguanosine-3'-phosphate
  modified_base 9: mod_base = OTHER; note = 2'-fluoroadenosine-3'-phosphate
  modified_base 10: mod_base = OTHER; note = 2'-O-methylcytidine-3'-phosphate
  modified_base 11: mod_base = OTHER; note = 2'-O-methyluridine-3'-phosphate
  modified_base 12: mod_base = OTHER; note = 2'-O-methyladenosine-3'-phosphate
  modified_base 13: mod_base = OTHER; note = 2'-O-methylguanosine-3'-phosphate
  modified_base 14: mod_base = OTHER; note = 2'-fluoroguanosine-3'-phosphate
  modified_base 15: mod_base = OTHER; note = 2'-O-methylcytidine-3'-phosphate
  modified_base 16: mod_base = OTHER; note = 2'-fluoroadenosine-3'-phosphate
  modified_base 17: mod_base = OTHER; note = 2'-O-methyluridine-3'-phosphate
  modified_base 18: mod_base = OTHER; note = 2'-O-methylguanosine-3'-phosphate
  modified_base 19: mod_base = OTHER; note = 2'-O-methyluridine-3'-phosphate
  modified_base 20: mod_base = OTHER; note = 2'-O-methyluridine-3'-phosphate
  modified_base 21: mod_base = OTHER; note = 2'-O-methylcytidine-3'-phosphorothioate
  modified_base 22: mod_base = OTHER; note = 2'-O-methyladenosine-3'-phosphorothioate
  modified_base 23: mod_base = OTHER; note = 2'-O-methylguanosine-3'-phosphate
aatgttggactaggcatgttcag

SEQ ID NO: 3806 - RNA, 23 nt, synthetic construct
  source 1..23: mol_type = other RNA; note = Description of Artificial Sequence: Synthetic oligonucleotide
  modified_base 1: mod_base = OTHER; note = 2'-O-methyladenosine-3'-phosphorothioate
  modified_base 2: mod_base = OTHER; note = 2'-fluorouridine -3'-phosphorothioate
  modified_base 3: mod_base = OTHER; note = 2'-O-methylguanosine-3'-phosphate
  modified_base 4: mod_base = OTHER; note = 2'-O-methylguanosine-3'-phosphate
  modified_base 5: mod_base = OTHER; note = 2'-O-methyluridine-3'-phosphate
  modified_base 6: mod_base = OTHER; note = 2'-fluoroadenosine-3'-phosphate
  modified_base 7: mod_base = OTHER; note = 2'-O-methyladenosine-3'-phosphate
  modified_base 8: mod_base = OTHER; note = 2'-fluorouridine-3'-phosphate
  modified_base 9: mod_base = OTHER; note = 2'-fluoroguanosine-3'-phosphate
  modified_base 10: mod_base = OTHER; note = 2'-O-methyluridine-3'-phosphate
  modified_base 11: mod_base = OTHER; note = 2'-O-methyladenosine-3'-phosphate
  modified_base 12: mod_base = OTHER; note = 2'-O-methylcytidine-3'-phosphate
  modified_base 13: mod_base = OTHER; note = 2'-O-methyladenosine-3'-phosphate
  modified_base 14: mod_base = OTHER; note = 2'-fluorocytidine-3'-phosphate
  modified_base 15: mod_base = OTHER; note = 2'-O-methyluridine-3'-phosphate
  modified_base 16: mod_base = OTHER; note = 2'-fluoroadenosine-3'-phosphate
  modified_base 17: mod_base = OTHER; note = 2'-O-methylcytidine-3'-phosphate
  modified_base 18: mod_base = OTHER; note = 2'-O-methyluridine-3'-phosphate
  modified_base 19: mod_base = OTHER; note = 2'-O-methylguanosine-3'-phosphate
  modified_base 20: mod_base = OTHER; note = 2'-O-methyladenosine-3'-phosphate
  modified_base 21: mod_base = OTHER; note = 2'-O-methyluridine-3'-phosphorothioate
  modified_base 22: mod_base = OTHER; note = 2'-O-methyladenosine-3'-phosphorothioate
  modified_base 23: mod_base = OTHER; note = 2'-O-methyluridine-3'-phosphate
atggtaatgtacactactgatat

SEQ ID NO: 3807 - RNA, 23 nt, synthetic construct
  source 1..23: mol_type = other RNA; note = Description of Artificial Sequence: Synthetic oligonucleotide
  modified_base 1: mod_base = OTHER; note = 2'-O-methyluridine-3'-phosphorothioate
  modified_base 2: mod_base = OTHER; note = 2'-fluoroadenosine-3'-phosphorothioate
  modified_base 3: mod_base = OTHER; note = 2'-O-methylguanosine-3'-phosphate
  modified_base 4: mod_base = OTHER; note = 2'-O-methyluridine-3'-phosphate
  modified_base 5: mod_base = OTHER; note = 2'-O-methyluridine-3'-phosphate
  modified_base 6: mod_base = OTHER; note = 2'-fluoroguanosine-3'-phosphate
  modified_base 7: mod_base = OTHER; note = 2'-O-methylguanosine-3'-phosphate
  modified_base 8: mod_base = OTHER; note = 2'-fluorouridine-3'-phosphate
  modified_base 9: mod_base = OTHER; note = 2'-fluoroadenosine-3'-phosphate
  modified_base 10: mod_base = OTHER; note = 2'-O-methyluridine-3'-phosphate
  modified_base 11: mod_base = OTHER; note = 2'-O-methyladenosine-3'-phosphate
  modified_base 12: mod_base = OTHER; note = 2'-O-methyladenosine-3'-phosphate
  modified_base 13: mod_base = OTHER; note = 2'-O-methylcytidine-3'-phosphate
  modified_base 14: mod_base = OTHER; note = 2'-fluoroadenosine-3'-phosphate
  modified_base 15: mod_base = OTHER; note = 2'-O-methylcytidine-3'-phosphate
  modified_base 16: mod_base = OTHER; note = 2'-fluorouridine-3'-phosphate
  modified_base 17: mod_base = OTHER; note = 2'-O-methyluridine-3'-phosphate
  modified_base 18: mod_base = OTHER; note = 2'-O-methylguanosine-3'-phosphate
  modified_base 19: mod_base = OTHER; note = 2'-O-methylguanosine-3'-phosphate
  modified_base 20: mod_base = OTHER; note = 2'-O-methyladenosine-3'-phosphate
  modified_base 21: mod_base = OTHER; note = 2'-O-methyluridine-3'-phosphorothioate
  modified_base 22: mod_base = OTHER; note = 2'-O-methyladenosine-3'-phosphorothioate
  modified_base 23: mod_base = OTHER; note = 2'-O-methylguanosine-3'-phosphate
tagttggtataacacttggatag

SEQ ID NO: 3808 - RNA, 23 nt, synthetic construct
  source 1..23: mol_type = other RNA; note = Description of Artificial Sequence: Synthetic oligonucleotide
  modified_base 1: mod_base = OTHER; note = 2'-O-methyluridine-3'-phosphorothioate
  modified_base 2: mod_base = OTHER; note = 2'-fluoroadenosine-3'-phosphorothioate
  modified_base 3: mod_base = OTHER; note = 2'-O-methylguanosine-3'-phosphate
  modified_base 4: mod_base = OTHER; note = 2'-O-methyluridine-3'-phosphate
  modified_base 5: mod_base = OTHER; note = 2'-O-methyluridine-3'-phosphate
  modified_base 6: mod_base = OTHER; note = 2'-fluoroguanosine-3'-phosphate
  modified_base 7: mod_base = OTHER; note = 2'-O-methylcytidine-3'-phosphate
  modified_base 8: mod_base = OTHER; note = 2'-fluorocytidine-3'-phosphate
  modified_base 9: mod_base = OTHER; note = 2'-fluoroadenosine-3'-phosphate
  modified_base 10: mod_base = OTHER; note = 2'-O-methyluridine-3'-phosphate
  modified_base 11: mod_base = OTHER; note = 2'-O-methyladenosine-3'-phosphate
  modified_base 12: mod_base = OTHER; note = 2'-O-methyluridine-3'-phosphate
  modified_base 13: mod_base = OTHER; note = 2'-O-methyluridine-3'-phosphate
  modified_base 14: mod_base = OTHER; note = 2'-fluoroguanosine-3'-phosphate
  modified_base 15: mod_base = OTHER; note = 2'-O-methylguanosine-3'-phosphate
  modified_base 16: mod_base = OTHER; note = 2'-fluoroadenosine-3'-phosphate
  modified_base 17: mod_base = OTHER; note = 2'-O-methylcytidine-3'-phosphate
  modified_base 18: mod_base = OTHER; note = 2'-O-methyluridine-3'-phosphate
  modified_base 19: mod_base = OTHER; note = 2'-O-methyluridine-3'-phosphate
  modified_base 20: mod_base = OTHER; note = 2'-O-methylguanosine-3'-phosphate
  modified_base 21: mod_base = OTHER; note = 2'-O-methylguanosine-3'-phosphorothioate
  modified_base 22: mod_base = OTHER; note = 2'-O-methyladenosine-3'-phosphorothioate
  modified_base 23: mod_base = OTHER; note = 2'-O-methyladenosine-3'-phosphate
tagttgccatattggacttggaa

SEQ ID NO: 3809 - RNA, 23 nt, synthetic construct
  source 1..23: mol_type = other RNA; note = Description of Artificial Sequence: Synthetic oligonucleotide
  modified_base 1: mod_base = OTHER; note = 2'-O-methyluridine-3'-phosphorothioate
  modified_base 2: mod_base = OTHER; note = 2'-fluoroadenosine-3'-phosphorothioate
  modified_base 3: mod_base = OTHER; note = 2'-O-methylcytidine-3'-phosphate
  modified_base 4: mod_base = OTHER; note = 2'-O-methylcytidine-3'-phosphate
  modified_base 5: mod_base = OTHER; note = 2'-O-methyluridine-3'-phosphate
  modified_base 6: mod_base = OTHER; note = 2'-fluorouridine-3'-phosphate
  modified_base 7: mod_base = OTHER; note = 2'-O-methylcytidine-3'-phosphate
  modified_base 8: mod_base = OTHER; note = 2'-fluoroadenosine-3'-phosphate
  modified_base 9: mod_base = OTHER; note = 2'-fluorocytidine-3'-phosphate
  modified_base 10: mod_base = OTHER; note = 2'-O-methyladenosine-3'-phosphate
  modified_base 11: mod_base = OTHER; note = 2'-O-methyladenosine-3'-phosphate
  modified_base 12: mod_base = OTHER; note = 2'-O-methylguanosine-3'-phosphate
  modified_base 13: mod_base = OTHER; note = 2'-O-methylguanosine-3'-phosphate
  modified_base 14: mod_base = OTHER; note = 2'-fluorouridine-3'-phosphate
  modified_base 15: mod_base = OTHER; note = 2'-O-methylcytidine-3'-phosphate
  modified_base 16: mod_base = OTHER; note = 2'-fluorouridine-3'-phosphate
  modified_base 17: mod_base = OTHER; note = 2'-O-methylguanosine-3'-phosphate
  modified_base 18: mod_base = OTHER; note = 2'-O-methyladenosine-3'-phosphate
  modified_base 19: mod_base = OTHER; note = 2'-O-methylguanosine-3'-phosphate
  modified_base 20: mod_base = OTHER; note = 2'-O-methyladenosine-3'-phosphate
  modified_base 21: mod_base = OTHER; note = 2'-O-methyluridine-3'-phosphorothioate
  modified_base 22: mod_base = OTHER; note = 2'-O-methyluridine-3'-phosphorothioate
  modified_base 23: mod_base = OTHER; note = 2'-O-methylcytidine-3'-phosphate
taccttcacaaggtctgagattc

SEQ ID NO: 3810 - RNA, 23 nt, synthetic construct
  source 1..23: mol_type = other RNA; note = Description of Artificial Sequence: Synthetic oligonucleotide
  modified_base 1: mod_base = OTHER; note = 2'-O-methyluridine-3'-phosphorothioate
  modified_base 2: mod_base = OTHER; note = 2'-fluoroguanosine-3'-phosphorothioate
  modified_base 3: mod_base = OTHER; note = 2'-O-methyluridine-3'-phosphate
  modified_base 4: mod_base = OTHER; note = 2'-O-methyladenosine-3'-phosphate
  modified_base 5: mod_base = OTHER; note = 2'-O-methylguanosine-3'-phosphate
  modified_base 6: mod_base = OTHER; note = 2'-fluorocytidine-3'-phosphate
  modified_base 7: mod_base = OTHER; note = 2'-O-methylcytidine-3'-phosphate
  modified_base 8: mod_base = OTHER; note = 2'-fluorouridine-3'-phosphate
  modified_base 9: mod_base = OTHER; note = 2'-fluoroadenosine-3'-phosphate
  modified_base 10: mod_base = OTHER; note = 2'-O-methylguanosine-3'-phosphate
  modified_base 11: mod_base = OTHER; note = 2'-O-methyladenosine-3'-phosphate
  modified_base 12: mod_base = OTHER; note = 2'-O-methylcytidine-3'-phosphate
  modified_base 13: mod_base = OTHER; note = 2'-O-methyladenosine-3'-phosphate
  modified_base 14: mod_base = OTHER; note = 2'-fluoroguanosine-3'-phosphate
  modified_base 15: mod_base = OTHER; note = 2'-O-methyluridine-3'-phosphate
  modified_base 16: mod_base = OTHER; note = 2'-fluoroguanosine-3'-phosphate
  modified_base 17: mod_base = OTHER; note = 2'-O-methyladenosine-3'-phosphate
  modified_base 18: mod_base = OTHER; note = 2'-O-methyladenosine-3'-phosphate
  modified_base 19: mod_base = OTHER; note = 2'-O-methyladenosine-3'-phosphate
  modified_base 20: mod_base = OTHER; note = 2'-O-methyluridine-3'-phosphate
  modified_base 21: mod_base = OTHER; note = 2'-O-methylguanosine-3'-phosphorothioate
  modified_base 22: mod_base = OTHER; note = 2'-O-methyladenosine-3'-phosphorothioate
  modified_base 23: mod_base = OTHER; note = 2'-O-methyluridine-3'-phosphate
tgtagcctagacagtgaaatgat

SEQ ID NO: 3811 - RNA, 23 nt, synthetic construct
  source 1..23: mol_type = other RNA; note = Description of Artificial Sequence: Synthetic oligonucleotide
  modified_base 1: mod_base = OTHER; note = 2'-O-methyladenosine-3'-phosphorothioate
  modified_base 2: mod_base = OTHER; note = 2'-fluoroguanosine-3'-phosphorothioate
  modified_base 3: mod_base = OTHER; note = 2'-O-methylcytidine-3'-phosphate
  modified_base 4: mod_base = OTHER; note = 2'-O-methyladenosine-3'-phosphate
  modified_base 5: mod_base = OTHER; note = 2'-O-methyluridine-3'-phosphate
  modified_base 6: mod_base = OTHER; note = 2'-fluorocytidine-3'-phosphate
  modified_base 7: mod_base = OTHER; note = 2'-O-methyladenosine-3'-phosphate
  modified_base 8: mod_base = OTHER; note = 2'-fluoroguanosine-3'-phosphate
  modified_base 9: mod_base = OTHER; note = 2'-fluoroguanosine-3'-phosphate
  modified_base 10: mod_base = OTHER; note = 2'-O-methyladenosine-3'-phosphate
  modified_base 11: mod_base = OTHER; note = 2'-O-methyluridine-3'-phosphate
  modified_base 12: mod_base = OTHER; note = 2'-O-methyladenosine-3'-phosphate
  modified_base 13: mod_base = OTHER; note = 2'-O-methyluridine-3'-phosphate
  modified_base 14: mod_base = OTHER; note = 2'-fluoroadenosine-3'-phosphate
  modified_base 15: mod_base = OTHER; note = 2'-O-methylguanosine-3'-phosphate
  modified_base 16: mod_base = OTHER; note = 2'-fluorocytidine-3'-phosphate
  modified_base 17: mod_base = OTHER; note = 2'-O-methyluridine-3'-phosphate
  modified_base 18: mod_base = OTHER; note = 2'-O-methylguanosine-3'-phosphate
  modified_base 19: mod_base = OTHER; note = 2'-O-methyluridine-3'-phosphate
  modified_base 20: mod_base = OTHER; note = 2'-O-methylguanosine-3'-phosphate
  modified_base 21: mod_base = OTHER; note = 2'-O-methylguanosine-3'-phosphorothioate
  modified_base 22: mod_base = OTHER; note = 2'-O-methyladenosine-3'-phosphorothioate
  modified_base 23: mod_base = OTHER; note = 2'-O-methyluridine-3'-phosphate
agcatcaggatatagctgtggat

SEQ ID NO: 3812 - RNA, 23 nt, synthetic construct
  source 1..23: mol_type = other RNA; note = Description of Artificial Sequence: Synthetic oligonucleotide
  modified_base 1: mod_base = OTHER; note = 2'-O-methyluridine-3'-phosphorothioate
  modified_base 2: mod_base = OTHER; note = 2'-fluoroadenosine-3'-phosphorothioate
  modified_base 3: mod_base = OTHER; note = 2'-O-methylcytidine-3'-phosphate
  modified_base 4: mod_base = OTHER; note = 2'-O-methyluridine-3'-phosphate
  modified_base 5: mod_base = OTHER; note = 2'-O-methyladenosine-3'-phosphate
  modified_base 6: mod_base = OTHER; note = 2'-fluoroguanosine-3'-phosphate
  modified_base 7: mod_base = OTHER; note = 2'-O-methylguanosine-3'-phosphate
  modified_base 8: mod_base = OTHER; note = 2'-fluorocytidine-3'-phosphate
  modified_base 9: mod_base = OTHER; note = 2'-fluoroadenosine-3'-phosphate
  modified_base 10: mod_base = OTHER; note = 2'-O-methyluridine-3'-phosphate
  modified_base 11: mod_base = OTHER; note = 2'-O-methylguanosine-3'-phosphate
  modified_base 12: mod_base = OTHER; note = 2'-O-methyluridine-3'-phosphate
  modified_base 13: mod_base = OTHER; note = 2'-O-methyluridine-3'-phosphate
  modified_base 14: mod_base = OTHER; note = 2'-fluorocytidine-3'-phosphate
  modified_base 15: mod_base = OTHER; note = 2'-O-methyladenosine-3'-phosphate
  modified_base 16: mod_base = OTHER; note = 2'-fluoroguanosine-3'-phosphate
  modified_base 17: mod_base = OTHER; note = 2'-O-methyluridine-3'-phosphate
  modified_base 18: mod_base = OTHER; note = 2'-O-methylguanosine-3'-phosphate
  modified_base 19: mod_base = OTHER; note = 2'-O-methyladenosine-3'-phosphate
  modified_base 20: mod_base = OTHER; note = 2'-O-methyladenosine-3'-phosphate
  modified_base 21: mod_base = OTHER; note = 2'-O-methylguanosine-3'-phosphorothioate
  modified_base 22: mod_base = OTHER; note = 2'-O-methylguanosine-3'-phosphorothioate
  modified_base 23: mod_base = OTHER; note = 2'-O-methyladenosine-3'-phosphate
tactaggcatgttcagtgaagga

SEQ ID NO: 3813 - RNA, 23 nt, synthetic construct
  source 1..23: mol_type = other RNA; note = Description of Artificial Sequence: Synthetic oligonucleotide
  modified_base 1: mod_base = OTHER; note = 2'-O-methyluridine-3'-phosphorothioate
  modified_base 2: mod_base = OTHER; note = 2'-fluorouridine -3'-phosphorothioate
  modified_base 3: mod_base = OTHER; note = 2'-O-methylcytidine-3'-phosphate
  modified_base 4: mod_base = OTHER; note = 2'-O-methyladenosine-3'-phosphate
  modified_base 5: mod_base = OTHER; note = 2'-O-methyluridine-3'-phosphate
  modified_base 6: mod_base = OTHER; note = 2'-fluoroadenosine-3'-phosphate
  modified_base 7: mod_base = OTHER; note = 2'-O-methyladenosine-3'-phosphate
  modified_base 8: mod_base = OTHER; note = 2'-fluoroguanosine-3'-phosphate
  modified_base 9: mod_base = OTHER; note = 2'-fluorocytidine-3'-phosphate
  modified_base 10: mod_base = OTHER; note = 2'-O-methyladenosine-3'-phosphate
  modified_base 11: mod_base = OTHER; note = 2'-O-methylcytidine-3'-phosphate
  modified_base 12: mod_base = OTHER; note = 2'-O-methyluridine-3'-phosphate
  modified_base 13: mod_base = OTHER; note = 2'-O-methylcytidine-3'-phosphate
  modified_base 14: mod_base = OTHER; note = 2'-fluorouridine-3'-phosphate
  modified_base 15: mod_base = OTHER; note = 2'-O-methylcytidine-3'-phosphate
  modified_base 16: mod_base = OTHER; note = 2'-fluoroadenosine-3'-phosphate
  modified_base 17: mod_base = OTHER; note = 2'-O-methyladenosine-3'-phosphate
  modified_base 18: mod_base = OTHER; note = 2'-O-methylcytidine-3'-phosphate
  modified_base 19: mod_base = OTHER; note = 2'-O-methylcytidine-3'-phosphate
  modified_base 20: mod_base = OTHER; note = 2'-O-methyladenosine-3'-phosphate
  modified_base 21: mod_base = OTHER; note = 2'-O-methylcytidine-3'-phosphorothioate
  modified_base 22: mod_base = OTHER; note = 2'-O-methylcytidine-3'-phosphorothioate
  modified_base 23: mod_base = OTHER; note = 2'-O-methyluridine-3'-phosphate
ttcataagcactctcaaccacct

SEQ ID NO: 3814 - RNA, 23 nt, synthetic construct
  source 1..23: mol_type = other RNA; note = Description of Artificial Sequence: Synthetic oligonucleotide
  modified_base 1: mod_base = OTHER; note = 2'-O-methyluridine-3'-phosphorothioate
  modified_base 2: mod_base = OTHER; note = 2'-fluoroadenosine-3'-phosphorothioate
  modified_base 3: mod_base = OTHER; note = 2'-O-methyluridine-3'-phosphate
  modified_base 4: mod_base = OTHER; note = 2'-O-methylguanosine-3'-phosphate
  modified_base 5: mod_base = OTHER; note = 2'-O-methyluridine-3'-phosphate
  modified_base 6: mod_base = OTHER; note = 2'-fluoroguanosine-3'-phosphate
  modified_base 7: mod_base = OTHER; note = 2'-O-methyluridine-3'-phosphate
  modified_base 8: mod_base = OTHER; note = 2'-fluoroadenosine-3'-phosphate
  modified_base 9: mod_base = OTHER; note = 2'-fluoroguanosine-3'-phosphate
  modified_base 10: mod_base = OTHER; note = 2'-O-methylcytidine-3'-phosphate
  modified_base 11: mod_base = OTHER; note = 2'-O-methylcytidine-3'-phosphate
  modified_base 12: mod_base = OTHER; note = 2'-O-methyluridine-3'-phosphate
  modified_base 13: mod_base = OTHER; note = 2'-O-methyluridine-3'-phosphate
  modified_base 14: mod_base = OTHER; note = 2'-fluorouridine-3'-phosphate
  modified_base 15: mod_base = OTHER; note = 2'-O-methylguanosine-3'-phosphate
  modified_base 16: mod_base = OTHER; note = 2'-fluoroadenosine-3'-phosphate
  modified_base 17: mod_base = OTHER; note = 2'-O-methylguanosine-3'-phosphate
  modified_base 18: mod_base = OTHER; note = 2'-O-methyluridine-3'-phosphate
  modified_base 19: mod_base = OTHER; note = 2'-O-methyluridine-3'-phosphate
  modified_base 20: mod_base = OTHER; note = 2'-O-methyluridine-3'-phosphate
  modified_base 21: mod_base = OTHER; note = 2'-O-methylguanosine-3'-phosphorothioate
  modified_base 22: mod_base = OTHER; note = 2'-O-methyladenosine-3'-phosphorothioate
  modified_base 23: mod_base = OTHER; note = 2'-O-methyluridine-3'-phosphate
tatgtgtagcctttgagtttgat

SEQ ID NO: 3815 - RNA, 23 nt, synthetic construct
  source 1..23: mol_type = other RNA; note = Description of Artificial Sequence: Synthetic oligonucleotide
  modified_base 1: mod_base = OTHER; note = 2'-O-methyluridine-3'-phosphorothioate
  modified_base 2: mod_base = OTHER; note = 2'-fluoroguanosine-3'-phosphorothioate
  modified_base 3: mod_base = OTHER; note = 2'-O-methyluridine-3'-phosphate
  modified_base 4: mod_base = OTHER; note = 2'-O-methyladenosine-3'-phosphate
  modified_base 5: mod_base = OTHER; note = 2'-O-methyladenosine-3'-phosphate
  modified_base 6: mod_base = OTHER; note = 2'-fluorouridine-3'-phosphate
  modified_base 7: mod_base = OTHER; note = 2'-O-methylguanosine-3'-phosphate
  modified_base 8: mod_base = OTHER; note = 2'-fluorouridine-3'-phosphate
  modified_base 9: mod_base = OTHER; note = 2'-fluoroadenosine-3'-phosphate
  modified_base 10: mod_base = OTHER; note = 2'-O-methylcytidine-3'-phosphate
  modified_base 11: mod_base = OTHER; note = 2'-O-methyladenosine-3'-phosphate
  modified_base 12: mod_base = OTHER; note = 2'-O-methylcytidine-3'-phosphate
  modified_base 13: mod_base = OTHER; note = 2'-O-methyluridine-3'-phosphate
  modified_base 14: mod_base = OTHER; note = 2'-fluoroadenosine-3'-phosphate
  modified_base 15: mod_base = OTHER; note = 2'-O-methylcytidine-3'-phosphate
  modified_base 16: mod_base = OTHER; note = 2'-fluorouridine-3'-phosphate
  modified_base 17: mod_base = OTHER; note = 2'-O-methylguanosine-3'-phosphate
  modified_base 18: mod_base = OTHER; note = 2'-O-methyladenosine-3'-phosphate
  modified_base 19: mod_base = OTHER; note = 2'-O-methyluridine-3'-phosphate
  modified_base 20: mod_base = OTHER; note = 2'-O-methyladenosine-3'-phosphate
  modified_base 21: mod_base = OTHER; note = 2'-O-methyluridine-3'-phosphorothioate
  modified_base 22: mod_base = OTHER; note = 2'-O-methyladenosine-3'-phosphorothioate
  modified_base 23: mod_base = OTHER; note = 2'-O-methylguanosine-3'-phosphate
tgtaatgtacactactgatatag

SEQ ID NO: 3816 - RNA, 23 nt, synthetic construct
  source 1..23: mol_type = other RNA; note = Description of Artificial Sequence: Synthetic oligonucleotide
  modified_base 1: mod_base = OTHER; note = 2'-O-methyluridine-3'-phosphorothioate
  modified_base 2: mod_base = OTHER; note = 2'-fluoroadenosine-3'-phosphorothioate
  modified_base 3: mod_base = OTHER; note = 2'-O-methyladenosine-3'-phosphate
  modified_base 4: mod_base = OTHER; note = 2'-O-methylcytidine-3'-phosphate
  modified_base 5: mod_base = OTHER; note = 2'-O-methyladenosine-3'-phosphate
  modified_base 6: mod_base = OTHER; note = 2'-fluorocytidine-3'-phosphate
  modified_base 7: mod_base = OTHER; note = 2'-O-methyluridine-3'-phosphate
  modified_base 8: mod_base = OTHER; note = 2'-fluorouridine-3'-phosphate
  modified_base 9: mod_base = OTHER; note = 2'-fluoroguanosine-3'-phosphate
  modified_base 10: mod_base = OTHER; note = 2'-O-methylguanosine-3'-phosphate
  modified_base 11: mod_base = OTHER; note = 2'-O-methyladenosine-3'-phosphate
  modified_base 12: mod_base = OTHER; note = 2'-O-methyluridine-3'-phosphate
  modified_base 13: mod_base = OTHER; note = 2'-O-methyladenosine-3'-phosphate
  modified_base 14: mod_base = OTHER; note = 2'-fluoroguanosine-3'-phosphate
  modified_base 15: mod_base = OTHER; note = 2'-O-methyluridine-3'-phosphate
  modified_base 16: mod_base = OTHER; note = 2'-fluorouridine-3'-phosphate
  modified_base 17: mod_base = OTHER; note = 2'-O-methylguanosine-3'-phosphate
  modified_base 18: mod_base = OTHER; note = 2'-O-methylguanosine-3'-phosphate
  modified_base 19: mod_base = OTHER; note = 2'-O-methyluridine-3'-phosphate
  modified_base 20: mod_base = OTHER; note = 2'-O-methyluridine-3'-phosphate
  modified_base 21: mod_base = OTHER; note = 2'-O-methylguanosine-3'-phosphorothioate
  modified_base 22: mod_base = OTHER; note = 2'-O-methylcytidine-3'-phosphorothioate
  modified_base 23: mod_base = OTHER; note = 2'-O-methyladenosine-3'-phosphate
taacacttggatagttggttgca

SEQ ID NO: 3817 - RNA, 23 nt, synthetic construct
  source 1..23: mol_type = other RNA; note = Description of Artificial Sequence: Synthetic oligonucleotide
  modified_base 1: mod_base = OTHER; note = 2'-O-methyluridine-3'-phosphorothioate
  modified_base 2: mod_base = OTHER; note = 2'-fluorocytidine-3'-phosphorothioate
  modified_base 3: mod_base = OTHER; note = 2'-O-methyluridine-3'-phosphate
  modified_base 4: mod_base = OTHER; note = 2'-O-methyluridine-3'-phosphate
  modified_base 5: mod_base = OTHER; note = 2'-O-methylcytidine-3'-phosphate
  modified_base 6: mod_base = OTHER; note = 2'-fluoroadenosine-3'-phosphate
  modified_base 7: mod_base = OTHER; note = 2'-O-methyladenosine-3'-phosphate
  modified_base 8: mod_base = OTHER; note = 2'-fluorouridine-3'-phosphate
  modified_base 9: mod_base = OTHER; note = 2'-fluorouridine-3'-phosphate
  modified_base 10: mod_base = OTHER; note = 2'-O-methyluridine-3'-phosphate
  modified_base 11: mod_base = OTHER; note = 2'-O-methylguanosine-3'-phosphate
  modified_base 12: mod_base = OTHER; note = 2'-O-methyluridine-3'-phosphate
  modified_base 13: mod_base = OTHER; note = 2'-O-methylcytidine-3'-phosphate
  modified_base 14: mod_base = OTHER; note = 2'-fluorouridine-3'-phosphate
  modified_base 15: mod_base = OTHER; note = 2'-O-methyluridine-3'-phosphate
  modified_base 16: mod_base = OTHER; note = 2'-fluorocytidine-3'-phosphate
  modified_base 17: mod_base = OTHER; note = 2'-O-methylguanosine-3'-phosphate
  modified_base 18: mod_base = OTHER; note = 2'-O-methyladenosine-3'-phosphate
  modified_base 19: mod_base = OTHER; note = 2'-O-methyluridine-3'-phosphate
  modified_base 20: mod_base = OTHER; note = 2'-O-methylguanosine-3'-phosphate
  modified_base 21: mod_base = OTHER; note = 2'-O-methyladenosine-3'-phosphorothioate
  modified_base 22: mod_base = OTHER; note = 2'-O-methylcytidine-3'-phosphorothioate
  modified_base 23: mod_base = OTHER; note = 2'-O-methyladenosine-3'-phosphate
tcttcaatttgtcttcgatgaca

SEQ ID NO: 3818 - RNA, 23 nt, synthetic construct
  source 1..23: mol_type = other RNA; note = Description of Artificial Sequence: Synthetic oligonucleotide
  modified_base 1: mod_base = OTHER; note = 2'-O-methyluridine-3'-phosphorothioate
  modified_base 2: mod_base = OTHER; note = 2'-fluoroadenosine-3'-phosphorothioate
  modified_base 3: mod_base = OTHER; note = 2'-O-methyluridine-3'-phosphate
  modified_base 4: mod_base = OTHER; note = 2'-O-methyladenosine-3'-phosphate
  modified_base 5: mod_base = OTHER; note = 2'-O-methylcytidine-3'-phosphate
  modified_base 6: mod_base = OTHER; note = 2'-fluorouridine-3'-phosphate
  modified_base 7: mod_base = OTHER; note = 2'-O-methylcytidine-3'-phosphate
  modified_base 8: mod_base = OTHER; note = 2'-fluorouridine-3'-phosphate
  modified_base 9: mod_base = OTHER; note = 2'-fluorocytidine-3'-phosphate
  modified_base 10: mod_base = OTHER; note = 2'-O-methyluridine-3'-phosphate
  modified_base 11: mod_base = OTHER; note = 2'-O-methylguanosine-3'-phosphate
  modified_base 12: mod_base = OTHER; note = 2'-O-methylcytidine-3'-phosphate
  modified_base 13: mod_base = OTHER; note = 2'-O-methylcytidine-3'-phosphate
  modified_base 14: mod_base = OTHER; note = 2'-fluoroadenosine-3'-phosphate
  modified_base 15: mod_base = OTHER; note = 2'-O-methyladenosine-3'-phosphate
  modified_base 16: mod_base = OTHER; note = 2'-fluoroadenosine-3'-phosphate
  modified_base 17: mod_base = OTHER; note = 2'-O-methyluridine-3'-phosphate
  modified_base 18: mod_base = OTHER; note = 2'-O-methylcytidine-3'-phosphate
  modified_base 19: mod_base = OTHER; note = 2'-O-methyluridine-3'-phosphate
  modified_base 20: mod_base = OTHER; note = 2'-O-methylguanosine-3'-phosphate
  modified_base 21: mod_base = OTHER; note = 2'-O-methylcytidine-3'-phosphorothioate
  modified_base 22: mod_base = OTHER; note = 2'-O-methyluridine-3'-phosphorothioate
  modified_base 23: mod_base = OTHER; note = 2'-O-methyladenosine-3'-phosphate
tatactctctgccaaatctgcta

SEQ ID NO: 3819 - RNA, 23 nt, synthetic construct
  source 1..23: mol_type = other RNA; note = Description of Artificial Sequence: Synthetic oligonucleotide
  modified_base 1: mod_base = OTHER; note = 2'-O-methyluridine-3'-phosphorothioate
  modified_base 2: mod_base = OTHER; note = 2'-fluoroadenosine-3'-phosphorothioate
  modified_base 3: mod_base = OTHER; note = 2'-O-methylguanosine-3'-phosphate
  modified_base 4: mod_base = OTHER; note = 2'-O-methylguanosine-3'-phosphate
  modified_base 5: mod_base = OTHER; note = 2'-O-methylcytidine-3'-phosphate
  modified_base 6: mod_base = OTHER; note = 2'-fluoroadenosine-3'-phosphate
  modified_base 7: mod_base = OTHER; note = 2'-O-methyluridine-3'-phosphate
  modified_base 8: mod_base = OTHER; note = 2'-fluoroguanosine-3'-phosphate
  modified_base 9: mod_base = OTHER; note = 2'-fluorouridine-3'-phosphate
  modified_base 10: mod_base = OTHER; note = 2'-O-methyluridine-3'-phosphate
  modified_base 11: mod_base = OTHER; note = 2'-O-methylcytidine-3'-phosphate
  modified_base 12: mod_base = OTHER; note = 2'-O-methyladenosine-3'-phosphate
  modified_base 13: mod_base = OTHER; note = 2'-O-methylguanosine-3'-phosphate
  modified_base 14: mod_base = OTHER; note = 2'-fluorouridine-3'-phosphate
  modified_base 15: mod_base = OTHER; note = 2'-O-methylguanosine-3'-phosphate
  modified_base 16: mod_base = OTHER; note = 2'-fluoroadenosine-3'-phosphate
  modified_base 17: mod_base = OTHER; note = 2'-O-methyladenosine-3'-phosphate
  modified_base 18: mod_base = OTHER; note = 2'-O-methylguanosine-3'-phosphate
  modified_base 19: mod_base = OTHER; note = 2'-O-methylguanosine-3'-phosphate
  modified_base 20: mod_base = OTHER; note = 2'-O-methyladenosine-3'-phosphate
  modified_base 21: mod_base = OTHER; note = 2'-O-methylguanosine-3'-phosphorothioate
  modified_base 22: mod_base = OTHER; note = 2'-O-methylcytidine-3'-phosphorothioate
  modified_base 23: mod_base = OTHER; note = 2'-O-methylcytidine-3'-phosphate
taggcatgttcagtgaaggagcc

SEQ ID NO: 3820 - RNA, 23 nt, synthetic construct
  source 1..23: mol_type = other RNA; note = Description of Artificial Sequence: Synthetic oligonucleotide
  modified_base 1: mod_base = OTHER; note = 2'-O-methyladenosine-3'-phosphorothioate
  modified_base 2: mod_base = OTHER; note = 2'-fluoroadenosine-3'-phosphorothioate
  modified_base 3: mod_base = OTHER; note = 2'-O-methyladenosine-3'-phosphate
  modified_base 4: mod_base = OTHER; note = 2'-O-methyladenosine-3'-phosphate
  modified_base 5: mod_base = OTHER; note = 2'-O-methyladenosine-3'-phosphate
  modified_base 6: mod_base = OTHER; note = 2'-fluorouridine-3'-phosphate
  modified_base 7: mod_base = OTHER; note = 2'-O-methylguanosine-3'-phosphate
  modified_base 8: mod_base = OTHER; note = 2'-fluorouridine-3'-phosphate
  modified_base 9: mod_base = OTHER; note = 2'-fluorouridine-3'-phosphate
  modified_base 10: mod_base = OTHER; note = 2'-O-methylguanosine-3'-phosphate
  modified_base 11: mod_base = OTHER; note = 2'-O-methylguanosine-3'-phosphate
  modified_base 12: mod_base = OTHER; note = 2'-O-methyladenosine-3'-phosphate
  modified_base 13: mod_base = OTHER; note = 2'-O-methylcytidine-3'-phosphate
  modified_base 14: mod_base = OTHER; note = 2'-fluorouridine-3'-phosphate
  modified_base 15: mod_base = OTHER; note = 2'-O-methyladenosine-3'-phosphate
  modified_base 16: mod_base = OTHER; note = 2'-fluoroguanosine-3'-phosphate
  modified_base 17: mod_base = OTHER; note = 2'-O-methylguanosine-3'-phosphate
  modified_base 18: mod_base = OTHER; note = 2'-O-methylcytidine-3'-phosphate
  modified_base 19: mod_base = OTHER; note = 2'-O-methyladenosine-3'-phosphate
  modified_base 20: mod_base = OTHER; note = 2'-O-methyluridine-3'-phosphate
  modified_base 21: mod_base = OTHER; note = 2'-O-methylguanosine-3'-phosphorothioate
  modified_base 22: mod_base = OTHER; note = 2'-O-methyluridine-3'-phosphorothioate
  modified_base 23: mod_base = OTHER; note = 2'-O-methyluridine-3'-phosphate
aaaaatgttggactaggcatgtt

SEQ ID NO: 3821 - RNA, 23 nt, synthetic construct
  source 1..23: mol_type = other RNA; note = Description of Artificial Sequence: Synthetic oligonucleotide
  modified_base 1: mod_base = OTHER; note = 2'-O-methyluridine-3'-phosphorothioate
  modified_base 2: mod_base = OTHER; note = 2'-fluorouridine -3'-phosphorothioate
  modified_base 3: mod_base = OTHER; note = 2'-O-methylcytidine-3'-phosphate
  modified_base 4: mod_base = OTHER; note = 2'-O-methyladenosine-3'-phosphate
  modified_base 5: mod_base = OTHER; note = 2'-O-methyluridine-3'-phosphate
  modified_base 6: mod_base = OTHER; note = 2'-fluorouridine-3'-phosphate
  modified_base 7: mod_base = OTHER; note = 2'-O-methyladenosine-3'-phosphate
  modified_base 8: mod_base = OTHER; note = 2'-fluoroadenosine-3'-phosphate
  modified_base 9: mod_base = OTHER; note = 2'-fluoroguanosine-3'-phosphate
  modified_base 10: mod_base = OTHER; note = 2'-O-methyladenosine-3'-phosphate
  modified_base 11: mod_base = OTHER; note = 2'-O-methyluridine-3'-phosphate
  modified_base 12: mod_base = OTHER; note = 2'-O-methyladenosine-3'-phosphate
  modified_base 13: mod_base = OTHER; note = 2'-O-methylcytidine-3'-phosphate
  modified_base 14: mod_base = OTHER; note = 2'-fluorouridine-3'-phosphate
  modified_base 15: mod_base = OTHER; note = 2'-O-methylguanosine-3'-phosphate
  modified_base 16: mod_base = OTHER; note = 2'-fluoroadenosine-3'-phosphate
  modified_base 17: mod_base = OTHER; note = 2'-O-methyluridine-3'-phosphate
  modified_base 18: mod_base = OTHER; note = 2'-O-methylguanosine-3'-phosphate
  modified_base 19: mod_base = OTHER; note = 2'-O-methylguanosine-3'-phosphate
  modified_base 20: mod_base = OTHER; note = 2'-O-methylcytidine-3'-phosphate
  modified_base 21: mod_base = OTHER; note = 2'-O-methyladenosine-3'-phosphorothioate
  modified_base 22: mod_base = OTHER; note = 2'-O-methylcytidine-3'-phosphorothioate
  modified_base 23: mod_base = OTHER; note = 2'-O-methyladenosine-3'-phosphate
ttcattaagatactgatggcaca

SEQ ID NO: 3822 - RNA, 23 nt, synthetic construct
  source 1..23: mol_type = other RNA; note = Description of Artificial Sequence: Synthetic oligonucleotide
  modified_base 1: mod_base = OTHER; note = 2'-O-methyluridine-3'-phosphorothioate
  modified_base 2: mod_base = OTHER; note = 2'-fluorouridine -3'-phosphorothioate
  modified_base 3: mod_base = OTHER; note = 2'-O-methyluridine-3'-phosphate
  modified_base 4: mod_base = OTHER; note = 2'-O-methylcytidine-3'-phosphate
  modified_base 5: mod_base = OTHER; note = 2'-O-methyladenosine-3'-phosphate
  modified_base 6: mod_base = OTHER; note = 2'-fluorouridine-3'-phosphate
  modified_base 7: mod_base = OTHER; note = 2'-O-methyluridine-3'-phosphate
  modified_base 8: mod_base = OTHER; note = 2'-fluoroadenosine-3'-phosphate
  modified_base 9: mod_base = OTHER; note = 2'-fluoroadenosine-3'-phosphate
  modified_base 10: mod_base = OTHER; note = 2'-O-methylguanosine-3'-phosphate
  modified_base 11: mod_base = OTHER; note = 2'-O-methyladenosine-3'-phosphate
  modified_base 12: mod_base = OTHER; note = 2'-O-methyluridine-3'-phosphate
  modified_base 13: mod_base = OTHER; note = 2'-O-methyladenosine-3'-phosphate
  modified_base 14: mod_base = OTHER; note = 2'-fluorocytidine-3'-phosphate
  modified_base 15: mod_base = OTHER; note = 2'-O-methyluridine-3'-phosphate
  modified_base 16: mod_base = OTHER; note = 2'-fluoroguanosine-3'-phosphate
  modified_base 17: mod_base = OTHER; note = 2'-O-methyladenosine-3'-phosphate
  modified_base 18: mod_base = OTHER; note = 2'-O-methyluridine-3'-phosphate
  modified_base 19: mod_base = OTHER; note = 2'-O-methylguanosine-3'-phosphate
  modified_base 20: mod_base = OTHER; note = 2'-O-methylguanosine-3'-phosphate
  modified_base 21: mod_base = OTHER; note = 2'-O-methylcytidine-3'-phosphorothioate
  modified_base 22: mod_base = OTHER; note = 2'-O-methyladenosine-3'-phosphorothioate
  modified_base 23: mod_base = OTHER; note = 2'-O-methylcytidine-3'-phosphate
tttcattaagatactgatggcac

SEQ ID NO: 3823 - RNA, 23 nt, synthetic construct
  source 1..23: mol_type = other RNA; note = Description of Artificial Sequence: Synthetic oligonucleotide
  modified_base 1: mod_base = OTHER; note = 2'-O-methyladenosine-3'-phosphorothioate
  modified_base 2: mod_base = OTHER; note = 2'-fluoroguanosine-3'-phosphorothioate
  modified_base 3: mod_base = OTHER; note = 2'-O-methyladenosine-3'-phosphate
  modified_base 4: mod_base = OTHER; note = 2'-O-methylcytidine-3'-phosphate
  modified_base 5: mod_base = OTHER; note = 2'-O-methyladenosine-3'-phosphate
  modified_base 6: mod_base = OTHER; note = 2'-fluoroadenosine-3'-phosphate
  modified_base 7: mod_base = OTHER; note = 2'-O-methyluridine-3'-phosphate
  modified_base 8: mod_base = OTHER; note = 2'-fluorocytidine-3'-phosphate
  modified_base 9: mod_base = OTHER; note = 2'-fluorouridine-3'-phosphate
  modified_base 10: mod_base = OTHER; note = 2'-O-methyluridine-3'-phosphate
  modified_base 11: mod_base = OTHER; note = 2'-O-methyluridine-3'-phosphate
  modified_base 12: mod_base = OTHER; note = 2'-O-methylguanosine-3'-phosphate
  modified_base 13: mod_base = OTHER; note = 2'-O-methylguanosine-3'-phosphate
  modified_base 14: mod_base = OTHER; note = 2'-fluorouridine-3'-phosphate
  modified_base 15: mod_base = OTHER; note = 2'-O-methylguanosine-3'-phosphate
  modified_base 16: mod_base = OTHER; note = 2'-fluorouridine-3'-phosphate
  modified_base 17: mod_base = OTHER; note = 2'-O-methyluridine-3'-phosphate
  modified_base 18: mod_base = OTHER; note = 2'-O-methylcytidine-3'-phosphate
  modified_base 19: mod_base = OTHER; note = 2'-O-methyluridine-3'-phosphate
  modified_base 20: mod_base = OTHER; note = 2'-O-methyladenosine-3'-phosphate
  modified_base 21: mod_base = OTHER; note = 2'-O-methyladenosine-3'-phosphorothioate
  modified_base 22: mod_base = OTHER; note = 2'-O-methylguanosine-3'-phosphorothioate
  modified_base 23: mod_base = OTHER; note = 2'-O-methylguanosine-3'-phosphate
agacaatctttggtgttctaagg

SEQ ID NO: 3824 - RNA, 23 nt, synthetic construct
  source 1..23: mol_type = other RNA; note = Description of Artificial Sequence: Synthetic oligonucleotide
  modified_base 1: mod_base = OTHER; note = 2'-O-methyluridine-3'-phosphorothioate
  modified_base 2: mod_base = OTHER; note = 2'-fluoroadenosine-3'-phosphorothioate
  modified_base 3: mod_base = OTHER; note = 2'-O-methylguanosine-3'-phosphate
  modified_base 4: mod_base = OTHER; note = 2'-O-methylcytidine-3'-phosphate
  modified_base 5: mod_base = OTHER; note = 2'-O-methylcytidine-3'-phosphate
  modified_base 6: mod_base = OTHER; note = 2'-fluorouridine-3'-phosphate
  modified_base 7: mod_base = OTHER; note = 2'-O-methyladenosine-3'-phosphate
  modified_base 8: mod_base = OTHER; note = 2'-fluoroguanosine-3'-phosphate
  modified_base 9: mod_base = OTHER; note = 2'-fluoroadenosine-3'-phosphate
  modified_base 10: mod_base = OTHER; note = 2'-O-methylcytidine-3'-phosphate
  modified_base 11: mod_base = OTHER; note = 2'-O-methyladenosine-3'-phosphate
  modified_base 12: mod_base = OTHER; note = 2'-O-methylguanosine-3'-phosphate
  modified_base 13: mod_base = OTHER; note = 2'-O-methyluridine-3'-phosphate
  modified_base 14: mod_base = OTHER; note = 2'-fluoroguanosine-3'-phosphate
  modified_base 15: mod_base = OTHER; note = 2'-O-methyladenosine-3'-phosphate
  modified_base 16: mod_base = OTHER; note = 2'-fluoroadenosine-3'-phosphate
  modified_base 17: mod_base = OTHER; note = 2'-O-methyladenosine-3'-phosphate
  modified_base 18: mod_base = OTHER; note = 2'-O-methyluridine-3'-phosphate
  modified_base 19: mod_base = OTHER; note = 2'-O-methylguanosine-3'-phosphate
  modified_base 20: mod_base = OTHER; note = 2'-O-methyladenosine-3'-phosphate
  modified_base 21: mod_base = OTHER; note = 2'-O-methyluridine-3'-phosphorothioate
  modified_base 22: mod_base = OTHER; note = 2'-O-methyladenosine-3'-phosphorothioate
  modified_base 23: mod_base = OTHER; note = 2'-O-methyluridine-3'-phosphate
tagcctagacagtgaaatgatat

SEQ ID NO: 3825 - RNA, 23 nt, synthetic construct
  source 1..23: mol_type = other RNA; note = Description of Artificial Sequence: Synthetic oligonucleotide
  modified_base 1: mod_base = OTHER; note = 2'-O-methyluridine-3'-phosphorothioate
  modified_base 2: mod_base = OTHER; note = 2'-fluorouridine -3'-phosphorothioate
  modified_base 3: mod_base = OTHER; note = 2'-O-methylguanosine-3'-phosphate
  modified_base 4: mod_base = OTHER; note = 2'-O-methyluridine-3'-phosphate
  modified_base 5: mod_base = OTHER; note = 2'-O-methyluridine-3'-phosphate
  modified_base 6: mod_base = OTHER; note = 2'-fluoroguanosine-3'-phosphate
  modified_base 7: mod_base = OTHER; note = 2'-O-methyluridine-3'-phosphate
  modified_base 8: mod_base = OTHER; note = 2'-fluoroadenosine-3'-phosphate
  modified_base 9: mod_base = OTHER; note = 2'-fluoroguanosine-3'-phosphate
  modified_base 10: mod_base = OTHER; note = 2'-O-methylcytidine-3'-phosphate
  modified_base 11: mod_base = OTHER; note = 2'-O-methylcytidine-3'-phosphate
  modified_base 12: mod_base = OTHER; note = 2'-O-methyluridine-3'-phosphate
  modified_base 13: mod_base = OTHER; note = 2'-O-methyladenosine-3'-phosphate
  modified_base 14: mod_base = OTHER; note = 2'-fluoroguanosine-3'-phosphate
  modified_base 15: mod_base = OTHER; note = 2'-O-methyladenosine-3'-phosphate
  modified_base 16: mod_base = OTHER; note = 2'-fluorocytidine-3'-phosphate
  modified_base 17: mod_base = OTHER; note = 2'-O-methyladenosine-3'-phosphate
  modified_base 18: mod_base = OTHER; note = 2'-O-methylguanosine-3'-phosphate
  modified_base 19: mod_base = OTHER; note = 2'-O-methyluridine-3'-phosphate
  modified_base 20: mod_base = OTHER; note = 2'-O-methylguanosine-3'-phosphate
  modified_base 21: mod_base = OTHER; note = 2'-O-methyladenosine-3'-phosphorothioate
  modified_base 22: mod_base = OTHER; note = 2'-O-methyladenosine-3'-phosphorothioate
  modified_base 23: mod_base = OTHER; note = 2'-O-methyladenosine-3'-phosphate
ttgttgtagcctagacagtgaaa

SEQ ID NO: 3826 - RNA, 23 nt, synthetic construct
  source 1..23: mol_type = other RNA; note = Description of Artificial Sequence: Synthetic oligonucleotide
  modified_base 1: mod_base = OTHER; note = 2'-O-methyluridine-3'-phosphorothioate
  modified_base 2: mod_base = OTHER; note = 2'-fluorouridine -3'-phosphorothioate
  modified_base 3: mod_base = OTHER; note = 2'-O-methylguanosine-3'-phosphate
  modified_base 4: mod_base = OTHER; note = 2'-O-methylguanosine-3'-phosphate
  modified_base 5: mod_base = OTHER; note = 2'-O-methyladenosine-3'-phosphate
  modified_base 6: mod_base = OTHER; note = 2'-fluorouridine-3'-phosphate
  modified_base 7: mod_base = OTHER; note = 2'-O-methyluridine-3'-phosphate
  modified_base 8: mod_base = OTHER; note = 2'-fluorouridine-3'-phosphate
  modified_base 9: mod_base = OTHER; note = 2'-fluoroadenosine-3'-phosphate
  modified_base 10: mod_base = OTHER; note = 2'-O-methyluridine-3'-phosphate
  modified_base 11: mod_base = OTHER; note = 2'-O-methyladenosine-3'-phosphate
  modified_base 12: mod_base = OTHER; note = 2'-O-methylcytidine-3'-phosphate
  modified_base 13: mod_base = OTHER; note = 2'-O-methyladenosine-3'-phosphate
  modified_base 14: mod_base = OTHER; note = 2'-fluorocytidine-3'-phosphate
  modified_base 15: mod_base = OTHER; note = 2'-O-methyluridine-3'-phosphate
  modified_base 16: mod_base = OTHER; note = 2'-fluoroguanosine-3'-phosphate
  modified_base 17: mod_base = OTHER; note = 2'-O-methylguanosine-3'-phosphate
  modified_base 18: mod_base = OTHER; note = 2'-O-methyladenosine-3'-phosphate
  modified_base 19: mod_base = OTHER; note = 2'-O-methyluridine-3'-phosphate
  modified_base 20: mod_base = OTHER; note = 2'-O-methylcytidine-3'-phosphate
  modified_base 21: mod_base = OTHER; note = 2'-O-methylcytidine-3'-phosphorothioate
  modified_base 22: mod_base = OTHER; note = 2'-O-methylcytidine-3'-phosphorothioate
  modified_base 23: mod_base = OTHER; note = 2'-O-methyladenosine-3'-phosphate
ttggatttatacactggatccca

SEQ ID NO: 3827 - RNA, 23 nt, synthetic construct
  source 1..23: mol_type = other RNA; note = Description of Artificial Sequence: Synthetic oligonucleotide
  modified_base 1: mod_base = OTHER; note = 2'-O-methyluridine-3'-phosphorothioate
  modified_base 2: mod_base = OTHER; note = 2'-fluoroguanosine-3'-phosphorothioate
  modified_base 3: mod_base = OTHER; note = 2'-O-methyluridine-3'-phosphate
  modified_base 4: mod_base = OTHER; note = 2'-O-methyladenosine-3'-phosphate
  modified_base 5: mod_base = OTHER; note = 2'-O-methyluridine-3'-phosphate
  modified_base 6: mod_base = OTHER; note = 2'-fluoroadenosine-3'-phosphate
  modified_base 7: mod_base = OTHER; note = 2'-O-methyladenosine-3'-phosphate
  modified_base 8: mod_base = OTHER; note = 2'-fluorocytidine-3'-phosphate
  modified_base 9: mod_base = OTHER; note = 2'-fluoroadenosine-3'-phosphate
  modified_base 10: mod_base = OTHER; note = 2'-O-methylcytidine-3'-phosphate
  modified_base 11: mod_base = OTHER; note = 2'-O-methyluridine-3'-phosphate
  modified_base 12: mod_base = OTHER; note = 2'-O-methyluridine-3'-phosphate
  modified_base 13: mod_base = OTHER; note = 2'-O-methylguanosine-3'-phosphate
  modified_base 14: mod_base = OTHER; note = 2'-fluoroguanosine-3'-phosphate
  modified_base 15: mod_base = OTHER; note = 2'-O-methyladenosine-3'-phosphate
  modified_base 16: mod_base = OTHER; note = 2'-fluorouridine-3'-phosphate
  modified_base 17: mod_base = OTHER; note = 2'-O-methyladenosine-3'-phosphate
  modified_base 18: mod_base = OTHER; note = 2'-O-methylguanosine-3'-phosphate
  modified_base 19: mod_base = OTHER; note = 2'-O-methyluridine-3'-phosphate
  modified_base 20: mod_base = OTHER; note = 2'-O-methyluridine-3'-phosphate
  modified_base 21: mod_base = OTHER; note = 2'-O-methylguanosine-3'-phosphorothioate
  modified_base 22: mod_base = OTHER; note = 2'-O-methylguanosine-3'-phosphorothioate
  modified_base 23: mod_base = OTHER; note = 2'-O-methyluridine-3'-phosphate
tgtataacacttggatagttggt

SEQ ID NO: 3828 - RNA, 23 nt, synthetic construct
  source 1..23: mol_type = other RNA; note = Description of Artificial Sequence: Synthetic oligonucleotide
  modified_base 1: mod_base = OTHER; note = 2'-O-methyluridine-3'-phosphorothioate
  modified_base 2: mod_base = OTHER; note = 2'-fluorocytidine-3'-phosphorothioate
  modified_base 3: mod_base = OTHER; note = 2'-O-methyladenosine-3'-phosphate
  modified_base 4: mod_base = OTHER; note = 2'-O-methyluridine-3'-phosphate
  modified_base 5: mod_base = OTHER; note = 2'-O-methyladenosine-3'-phosphate
  modified_base 6: mod_base = OTHER; note = 2'-fluorouridine-3'-phosphate
  modified_base 7: mod_base = OTHER; note = 2'-O-methyluridine-3'-phosphate
  modified_base 8: mod_base = OTHER; note = 2'-fluoroguanosine-3'-phosphate
  modified_base 9: mod_base = OTHER; note = 2'-fluoroguanosine-3'-phosphate
  modified_base 10: mod_base = OTHER; note = 2'-O-methyladenosine-3'-phosphate
  modified_base 11: mod_base = OTHER; note = 2'-O-methylcytidine-3'-phosphate
  modified_base 12: mod_base = OTHER; note = 2'-O-methyluridine-3'-phosphate
  modified_base 13: mod_base = OTHER; note = 2'-O-methyluridine-3'-phosphate
  modified_base 14: mod_base = OTHER; note = 2'-fluoroguanosine-3'-phosphate
  modified_base 15: mod_base = OTHER; note = 2'-O-methylguanosine-3'-phosphate
  modified_base 16: mod_base = OTHER; note = 2'-fluoroadenosine-3'-phosphate
  modified_base 17: mod_base = OTHER; note = 2'-O-methyladenosine-3'-phosphate
  modified_base 18: mod_base = OTHER; note = 2'-O-methylcytidine-3'-phosphate
  modified_base 19: mod_base = OTHER; note = 2'-O-methylcytidine-3'-phosphate
  modified_base 20: mod_base = OTHER; note = 2'-O-methyladenosine-3'-phosphate
  modified_base 21: mod_base = OTHER; note = 2'-O-methyladenosine-3'-phosphorothioate
  modified_base 22: mod_base = OTHER; note = 2'-O-methyladenosine-3'-phosphorothioate
  modified_base 23: mod_base = OTHER; note = 2'-O-methyladenosine-3'-phosphate
tcatattggacttggaaccaaaa

SEQ ID NO: 3829 - RNA, 23 nt, synthetic construct
  source 1..23: mol_type = other RNA; note = Description of Artificial Sequence: Synthetic oligonucleotide
  modified_base 1: mod_base = OTHER; note = 2'-O-methyladenosine-3'-phosphorothioate
  modified_base 2: mod_base = OTHER; note = 2'-fluoroguanosine-3'-phosphorothioate
  modified_base 3: mod_base = OTHER; note = 2'-O-methyluridine-3'-phosphate
  modified_base 4: mod_base = OTHER; note = 2'-O-methyluridine-3'-phosphate
  modified_base 5: mod_base = OTHER; note = 2'-O-methyluridine-3'-phosphate
  modified_base 6: mod_base = OTHER; note = 2'-fluoroguanosine-3'-phosphate
  modified_base 7: mod_base = OTHER; note = 2'-O-methyladenosine-3'-phosphate
  modified_base 8: mod_base = OTHER; note = 2'-fluorouridine-3'-phosphate
  modified_base 9: mod_base = OTHER; note = 2'-fluorocytidine-3'-phosphate
  modified_base 10: mod_base = OTHER; note = 2'-O-methyladenosine-3'-phosphate
  modified_base 11: mod_base = OTHER; note = 2'-O-methylcytidine-3'-phosphate
  modified_base 12: mod_base = OTHER; note = 2'-O-methylcytidine-3'-phosphate
  modified_base 13: mod_base = OTHER; note = 2'-O-methyluridine-3'-phosphate
  modified_base 14: mod_base = OTHER; note = 2'-fluorocytidine-3'-phosphate
  modified_base 15: mod_base = OTHER; note = 2'-O-methyladenosine-3'-phosphate
  modified_base 16: mod_base = OTHER; note = 2'-fluorouridine-3'-phosphate
  modified_base 17: mod_base = OTHER; note = 2'-O-methyladenosine-3'-phosphate
  modified_base 18: mod_base = OTHER; note = 2'-O-methyladenosine-3'-phosphate
  modified_base 19: mod_base = OTHER; note = 2'-O-methylguanosine-3'-phosphate
  modified_base 20: mod_base = OTHER; note = 2'-O-methylcytidine-3'-phosphate
  modified_base 21: mod_base = OTHER; note = 2'-O-methyladenosine-3'-phosphorothioate
  modified_base 22: mod_base = OTHER; note = 2'-O-methylcytidine-3'-phosphorothioate
  modified_base 23: mod_base = OTHER; note = 2'-O-methyluridine-3'-phosphate
agtttgatcacctcataagcact

SEQ ID NO: 3830 - RNA, 23 nt, synthetic construct
  source 1..23: mol_type = other RNA; note = Description of Artificial Sequence: Synthetic oligonucleotide
  modified_base 1: mod_base = OTHER; note = 2'-O-methyluridine-3'-phosphorothioate
  modified_base 2: mod_base = OTHER; note = 2'-fluoroguanosine-3'-phosphorothioate
  modified_base 3: mod_base = OTHER; note = 2'-O-methyladenosine-3'-phosphate
  modified_base 4: mod_base = OTHER; note = 2'-O-methyluridine-3'-phosphate
  modified_base 5: mod_base = OTHER; note = 2'-O-methylguanosine-3'-phosphate
  modified_base 6: mod_base = OTHER; note = 2'-fluorouridine-3'-phosphate
  modified_base 7: mod_base = OTHER; note = 2'-O-methylguanosine-3'-phosphate
  modified_base 8: mod_base = OTHER; note = 2'-fluorouridine-3'-phosphate
  modified_base 9: mod_base = OTHER; note = 2'-fluoroadenosine-3'-phosphate
  modified_base 10: mod_base = OTHER; note = 2'-O-methylguanosine-3'-phosphate
  modified_base 11: mod_base = OTHER; note = 2'-O-methylcytidine-3'-phosphate
  modified_base 12: mod_base = OTHER; note = 2'-O-methylcytidine-3'-phosphate
  modified_base 13: mod_base = OTHER; note = 2'-O-methyluridine-3'-phosphate
  modified_base 14: mod_base = OTHER; note = 2'-fluorouridine-3'-phosphate
  modified_base 15: mod_base = OTHER; note = 2'-O-methyluridine-3'-phosphate
  modified_base 16: mod_base = OTHER; note = 2'-fluoroguanosine-3'-phosphate
  modified_base 17: mod_base = OTHER; note = 2'-O-methyladenosine-3'-phosphate
  modified_base 18: mod_base = OTHER; note = 2'-O-methylguanosine-3'-phosphate
  modified_base 19: mod_base = OTHER; note = 2'-O-methyluridine-3'-phosphate
  modified_base 20: mod_base = OTHER; note = 2'-O-methyluridine-3'-phosphate
  modified_base 21: mod_base = OTHER; note = 2'-O-methyluridine-3'-phosphorothioate
  modified_base 22: mod_base = OTHER; note = 2'-O-methylguanosine-3'-phosphorothioate
  modified_base 23: mod_base = OTHER; note = 2'-O-methyladenosine-3'-phosphate
tgatgtgtagcctttgagtttga

SEQ ID NO: 3831 - RNA, 23 nt, synthetic construct
  source 1..23: mol_type = other RNA; note = Description of Artificial Sequence: Synthetic oligonucleotide
  modified_base 1: mod_base = OTHER; note = 2'-O-methyluridine-3'-phosphorothioate
  modified_base 2: mod_base = OTHER; note = 2'-fluorocytidine-3'-phosphorothioate
  modified_base 3: mod_base = OTHER; note = 2'-O-methyladenosine-3'-phosphate
  modified_base 4: mod_base = OTHER; note = 2'-O-methylcytidine-3'-phosphate
  modified_base 5: mod_base = OTHER; note = 2'-O-methylcytidine-3'-phosphate
  modified_base 6: mod_base = OTHER; note = 2'-fluorouridine-3'-phosphate
  modified_base 7: mod_base = OTHER; note = 2'-O-methyluridine-3'-phosphate
  modified_base 8: mod_base = OTHER; note = 2'-fluorocytidine-3'-phosphate
  modified_base 9: mod_base = OTHER; note = 2'-fluoroadenosine-3'-phosphate
  modified_base 10: mod_base = OTHER; note = 2'-O-methylcytidine-3'-phosphate
  modified_base 11: mod_base = OTHER; note = 2'-O-methyladenosine-3'-phosphate
  modified_base 12: mod_base = OTHER; note = 2'-O-methyladenosine-3'-phosphate
  modified_base 13: mod_base = OTHER; note = 2'-O-methylguanosine-3'-phosphate
  modified_base 14: mod_base = OTHER; note = 2'-fluoroguanosine-3'-phosphate
  modified_base 15: mod_base = OTHER; note = 2'-O-methyluridine-3'-phosphate
  modified_base 16: mod_base = OTHER; note = 2'-fluorocytidine-3'-phosphate
  modified_base 17: mod_base = OTHER; note = 2'-O-methyluridine-3'-phosphate
  modified_base 18: mod_base = OTHER; note = 2'-O-methylguanosine-3'-phosphate
  modified_base 19: mod_base = OTHER; note = 2'-O-methyladenosine-3'-phosphate
  modified_base 20: mod_base = OTHER; note = 2'-O-methylguanosine-3'-phosphate
  modified_base 21: mod_base = OTHER; note = 2'-O-methyladenosine-3'-phosphorothioate
  modified_base 22: mod_base = OTHER; note = 2'-O-methyluridine-3'-phosphorothioate
  modified_base 23: mod_base = OTHER; note = 2'-O-methyluridine-3'-phosphate
tcaccttcacaaggtctgagatt

SEQ ID NO: 3832 - RNA, 23 nt, synthetic construct
  source 1..23: mol_type = other RNA; note = Description of Artificial Sequence: Synthetic oligonucleotide
  modified_base 1: mod_base = OTHER; note = 2'-O-methyladenosine-3'-phosphorothioate
  modified_base 2: mod_base = OTHER; note = 2'-fluoroguanosine-3'-phosphorothioate
  modified_base 3: mod_base = OTHER; note = 2'-O-methylguanosine-3'-phosphate
  modified_base 4: mod_base = OTHER; note = 2'-O-methyladenosine-3'-phosphate
  modified_base 5: mod_base = OTHER; note = 2'-O-methyluridine-3'-phosphate
  modified_base 6: mod_base = OTHER; note = 2'-fluoroadenosine-3'-phosphate
  modified_base 7: mod_base = OTHER; note = 2'-O-methyluridine-3'-phosphate
  modified_base 8: mod_base = OTHER; note = 2'-fluoroadenosine-3'-phosphate
  modified_base 9: mod_base = OTHER; note = 2'-fluoroguanosine-3'-phosphate
  modified_base 10: mod_base = OTHER; note = 2'-O-methylcytidine-3'-phosphate
  modified_base 11: mod_base = OTHER; note = 2'-O-methyluridine-3'-phosphate
  modified_base 12: mod_base = OTHER; note = 2'-O-methylguanosine-3'-phosphate
  modified_base 13: mod_base = OTHER; note = 2'-O-methyluridine-3'-phosphate
  modified_base 14: mod_base = OTHER; note = 2'-fluoroguanosine-3'-phosphate
  modified_base 15: mod_base = OTHER; note = 2'-O-methylguanosine-3'-phosphate
  modified_base 16: mod_base = OTHER; note = 2'-fluoroadenosine-3'-phosphate
  modified_base 17: mod_base = OTHER; note = 2'-O-methyluridine-3'-phosphate
  modified_base 18: mod_base = OTHER; note = 2'-O-methyluridine-3'-phosphate
  modified_base 19: mod_base = OTHER; note = 2'-O-methyluridine-3'-phosphate
  modified_base 20: mod_base = OTHER; note = 2'-O-methyluridine-3'-phosphate
  modified_base 21: mod_base = OTHER; note = 2'-O-methyladenosine-3'-phosphorothioate
  modified_base 22: mod_base = OTHER; note = 2'-O-methylcytidine-3'-phosphorothioate
  modified_base 23: mod_base = OTHER; note = 2'-O-methyladenosine-3'-phosphate
aggatatagctgtggattttaca

SEQ ID NO: 3833 - RNA, 23 nt, synthetic construct
  source 1..23: mol_type = other RNA; note = Description of Artificial Sequence: Synthetic oligonucleotide
  modified_base 1: mod_base = OTHER; note = 2'-O-methyladenosine-3'-phosphorothioate
  modified_base 2: mod_base = OTHER; note = 2'-fluorocytidine-3'-phosphorothioate
  modified_base 3: mod_base = OTHER; note = 2'-O-methyluridine-3'-phosphate
  modified_base 4: mod_base = OTHER; note = 2'-O-methyladenosine-3'-phosphate
  modified_base 5: mod_base = OTHER; note = 2'-O-methylguanosine-3'-phosphate
  modified_base 6: mod_base = OTHER; note = 2'-fluoroguanosine-3'-phosphate
  modified_base 7: mod_base = OTHER; note = 2'-O-methylcytidine-3'-phosphate
  modified_base 8: mod_base = OTHER; note = 2'-fluoroadenosine-3'-phosphate
  modified_base 9: mod_base = OTHER; note = 2'-fluorouridine-3'-phosphate
  modified_base 10: mod_base = OTHER; note = 2'-O-methylguanosine-3'-phosphate
  modified_base 11: mod_base = OTHER; note = 2'-O-methyluridine-3'-phosphate
  modified_base 12: mod_base = OTHER; note = 2'-O-methyluridine-3'-phosphate
  modified_base 13: mod_base = OTHER; note = 2'-O-methylcytidine-3'-phosphate
  modified_base 14: mod_base = OTHER; note = 2'-fluoroadenosine-3'-phosphate
  modified_base 15: mod_base = OTHER; note = 2'-O-methylguanosine-3'-phosphate
  modified_base 16: mod_base = OTHER; note = 2'-fluorouridine-3'-phosphate
  modified_base 17: mod_base = OTHER; note = 2'-O-methylguanosine-3'-phosphate
  modified_base 18: mod_base = OTHER; note = 2'-O-methyladenosine-3'-phosphate
  modified_base 19: mod_base = OTHER; note = 2'-O-methyladenosine-3'-phosphate
  modified_base 20: mod_base = OTHER; note = 2'-O-methylguanosine-3'-phosphate
  modified_base 21: mod_base = OTHER; note = 2'-O-methylguanosine-3'-phosphorothioate
  modified_base 22: mod_base = OTHER; note = 2'-O-methyladenosine-3'-phosphorothioate
  modified_base 23: mod_base = OTHER; note = 2'-O-methylguanosine-3'-phosphate
actaggcatgttcagtgaaggag

SEQ ID NO: 3834 - RNA, 23 nt, synthetic construct
  source 1..23: mol_type = other RNA; note = Description of Artificial Sequence: Synthetic oligonucleotide
  modified_base 1: mod_base = OTHER; note = 2'-O-methyluridine-3'-phosphorothioate
  modified_base 2: mod_base = OTHER; note = 2'-fluoroguanosine-3'-phosphorothioate
  modified_base 3: mod_base = OTHER; note = 2'-O-methylguanosine-3'-phosphate
  modified_base 4: mod_base = OTHER; note = 2'-O-methyladenosine-3'-phosphate
  modified_base 5: mod_base = OTHER; note = 2'-O-methyluridine-3'-phosphate
  modified_base 6: mod_base = OTHER; note = 2'-fluorouridine-3'-phosphate
  modified_base 7: mod_base = OTHER; note = 2'-O-methyluridine-3'-phosphate
  modified_base 8: mod_base = OTHER; note = 2'-fluoroadenosine-3'-phosphate
  modified_base 9: mod_base = OTHER; note = 2'-fluorouridine-3'-phosphate
  modified_base 10: mod_base = OTHER; note = 2'-O-methyladenosine-3'-phosphate
  modified_base 11: mod_base = OTHER; note = 2'-O-methylcytidine-3'-phosphate
  modified_base 12: mod_base = OTHER; note = 2'-O-methyladenosine-3'-phosphate
  modified_base 13: mod_base = OTHER; note = 2'-O-methylcytidine-3'-phosphate
  modified_base 14: mod_base = OTHER; note = 2'-fluorouridine-3'-phosphate
  modified_base 15: mod_base = OTHER; note = 2'-O-methylguanosine-3'-phosphate
  modified_base 16: mod_base = OTHER; note = 2'-fluoroguanosine-3'-phosphate
  modified_base 17: mod_base = OTHER; note = 2'-O-methyladenosine-3'-phosphate
  modified_base 18: mod_base = OTHER; note = 2'-O-methyluridine-3'-phosphate
  modified_base 19: mod_base = OTHER; note = 2'-O-methylcytidine-3'-phosphate
  modified_base 20: mod_base = OTHER; note = 2'-O-methylcytidine-3'-phosphate
  modified_base 21: mod_base = OTHER; note = 2'-O-methylcytidine-3'-phosphorothioate
  modified_base 22: mod_base = OTHER; note = 2'-O-methyladenosine-3'-phosphorothioate
  modified_base 23: mod_base = OTHER; note = 2'-O-methylguanosine-3'-phosphate
tggatttatacactggatcccag

SEQ ID NO: 3835 - RNA, 23 nt, synthetic construct
  source 1..23: mol_type = other RNA; note = Description of Artificial Sequence: Synthetic oligonucleotide
  modified_base 1: mod_base = OTHER; note = 2'-O-methyluridine-3'-phosphorothioate
  modified_base 2: mod_base = OTHER; note = 2'-fluorouridine -3'-phosphorothioate
  modified_base 3: mod_base = OTHER; note = 2'-O-methylcytidine-3'-phosphate
  modified_base 4: mod_base = OTHER; note = 2'-O-methyladenosine-3'-phosphate
  modified_base 5: mod_base = OTHER; note = 2'-O-methylcytidine-3'-phosphate
  modified_base 6: mod_base = OTHER; note = 2'-fluorouridine-3'-phosphate
  modified_base 7: mod_base = OTHER; note = 2'-O-methylguanosine-3'-phosphate
  modified_base 8: mod_base = OTHER; note = 2'-fluorouridine-3'-phosphate
  modified_base 9: mod_base = OTHER; note = 2'-fluorouridine-3'-phosphate
  modified_base 10: mod_base = OTHER; note = 2'-O-methylcytidine-3'-phosphate
  modified_base 11: mod_base = OTHER; note = 2'-O-methyladenosine-3'-phosphate
  modified_base 12: mod_base = OTHER; note = 2'-O-methyladenosine-3'-phosphate
  modified_base 13: mod_base = OTHER; note = 2'-O-methylguanosine-3'-phosphate
  modified_base 14: mod_base = OTHER; note = 2'-fluoroguanosine-3'-phosphate
  modified_base 15: mod_base = OTHER; note = 2'-O-methyluridine-3'-phosphate
  modified_base 16: mod_base = OTHER; note = 2'-fluorouridine-3'-phosphate
  modified_base 17: mod_base = OTHER; note = 2'-O-methyluridine-3'-phosphate
  modified_base 18: mod_base = OTHER; note = 2'-O-methyladenosine-3'-phosphate
  modified_base 19: mod_base = OTHER; note = 2'-O-methyluridine-3'-phosphate
  modified_base 20: mod_base = OTHER; note = 2'-O-methyluridine-3'-phosphate
  modified_base 21: mod_base = OTHER; note = 2'-O-methylguanosine-3'-phosphorothioate
  modified_base 22: mod_base = OTHER; note = 2'-O-methylguanosine-3'-phosphorothioate
  modified_base 23: mod_base = OTHER; note = 2'-O-methylguanosine-3'-phosphate
ttcactgttcaaggtttattggg

SEQ ID NO: 3836 - RNA, 23 nt, synthetic construct
  source 1..23: mol_type = other RNA; note = Description of Artificial Sequence: Synthetic oligonucleotide
  modified_base 1: mod_base = OTHER; note = 2'-O-methyladenosine-3'-phosphorothioate
  modified_base 2: mod_base = OTHER; note = 2'-fluoroadenosine-3'-phosphorothioate
  modified_base 3: mod_base = OTHER; note = 2'-O-methylguanosine-3'-phosphate
  modified_base 4: mod_base = OTHER; note = 2'-O-methyladenosine-3'-phosphate
  modified_base 5: mod_base = OTHER; note = 2'-O-methyluridine-3'-phosphate
  modified_base 6: mod_base = OTHER; note = 2'-fluoroadenosine-3'-phosphate
  modified_base 7: mod_base = OTHER; note = 2'-O-methylcytidine-3'-phosphate
  modified_base 8: mod_base = OTHER; note = 2'-fluorouridine-3'-phosphate
  modified_base 9: mod_base = OTHER; note = 2'-fluoroguanosine-3'-phosphate
  modified_base 10: mod_base = OTHER; note = 2'-O-methyladenosine-3'-phosphate
  modified_base 11: mod_base = OTHER; note = 2'-O-methyluridine-3'-phosphate
  modified_base 12: mod_base = OTHER; note = 2'-O-methylguanosine-3'-phosphate
  modified_base 13: mod_base = OTHER; note = 2'-O-methylguanosine-3'-phosphate
  modified_base 14: mod_base = OTHER; note = 2'-fluorocytidine-3'-phosphate
  modified_base 15: mod_base = OTHER; note = 2'-O-methyladenosine-3'-phosphate
  modified_base 16: mod_base = OTHER; note = 2'-fluorocytidine-3'-phosphate
  modified_base 17: mod_base = OTHER; note = 2'-O-methyladenosine-3'-phosphate
  modified_base 18: mod_base = OTHER; note = 2'-O-methylguanosine-3'-phosphate
  modified_base 19: mod_base = OTHER; note = 2'-O-methylguanosine-3'-phosphate
  modified_base 20: mod_base = OTHER; note = 2'-O-methylcytidine-3'-phosphate
  modified_base 21: mod_base = OTHER; note = 2'-O-methylcytidine-3'-phosphorothioate
  modified_base 22: mod_base = OTHER; note = 2'-O-methyladenosine-3'-phosphorothioate
  modified_base 23: mod_base = OTHER; note = 2'-O-methyluridine-3'-phosphate
aagatactgatggcacaggccat

SEQ ID NO: 3837 - RNA, 23 nt, synthetic construct
  source 1..23: mol_type = other RNA; note = Description of Artificial Sequence: Synthetic oligonucleotide
  modified_base 1: mod_base = OTHER; note = 2'-O-methyluridine-3'-phosphorothioate
  modified_base 2: mod_base = OTHER; note = 2'-fluoroguanosine-3'-phosphorothioate
  modified_base 3: mod_base = OTHER; note = 2'-O-methyluridine-3'-phosphate
  modified_base 4: mod_base = OTHER; note = 2'-O-methylcytidine-3'-phosphate
  modified_base 5: mod_base = OTHER; note = 2'-O-methyluridine-3'-phosphate
  modified_base 6: mod_base = OTHER; note = 2'-fluorouridine-3'-phosphate
  modified_base 7: mod_base = OTHER; note = 2'-O-methylcytidine-3'-phosphate
  modified_base 8: mod_base = OTHER; note = 2'-fluoroguanosine-3'-phosphate
  modified_base 9: mod_base = OTHER; note = 2'-fluoroadenosine-3'-phosphate
  modified_base 10: mod_base = OTHER; note = 2'-O-methyluridine-3'-phosphate
  modified_base 11: mod_base = OTHER; note = 2'-O-methylguanosine-3'-phosphate
  modified_base 12: mod_base = OTHER; note = 2'-O-methyladenosine-3'-phosphate
  modified_base 13: mod_base = OTHER; note = 2'-O-methylcytidine-3'-phosphate
  modified_base 14: mod_base = OTHER; note = 2'-fluoroadenosine-3'-phosphate
  modified_base 15: mod_base = OTHER; note = 2'-O-methyluridine-3'-phosphate
  modified_base 16: mod_base = OTHER; note = 2'-fluorocytidine-3'-phosphate
  modified_base 17: mod_base = OTHER; note = 2'-O-methyladenosine-3'-phosphate
  modified_base 18: mod_base = OTHER; note = 2'-O-methyladenosine-3'-phosphate
  modified_base 19: mod_base = OTHER; note = 2'-O-methylcytidine-3'-phosphate
  modified_base 20: mod_base = OTHER; note = 2'-O-methyladenosine-3'-phosphate
  modified_base 21: mod_base = OTHER; note = 2'-O-methyladenosine-3'-phosphorothioate
  modified_base 22: mod_base = OTHER; note = 2'-O-methylguanosine-3'-phosphorothioate
  modified_base 23: mod_base = OTHER; note = 2'-O-methyladenosine-3'-phosphate
tgtcttcgatgacatcaacaaga

SEQ ID NO: 3838 - RNA, 23 nt, synthetic construct
  source 1..23: mol_type = other RNA; note = Description of Artificial Sequence: Synthetic oligonucleotide
  modified_base 1: mod_base = OTHER; note = 2'-O-methyladenosine-3'-phosphorothioate
  modified_base 2: mod_base = OTHER; note = 2'-fluorouridine -3'-phosphorothioate
  modified_base 3: mod_base = OTHER; note = 2'-O-methyladenosine-3'-phosphate
  modified_base 4: mod_base = OTHER; note = 2'-O-methylguanosine-3'-phosphate
  modified_base 5: mod_base = OTHER; note = 2'-O-methyluridine-3'-phosphate
  modified_base 6: mod_base = OTHER; note = 2'-fluorouridine-3'-phosphate
  modified_base 7: mod_base = OTHER; note = 2'-O-methylcytidine-3'-phosphate
  modified_base 8: mod_base = OTHER; note = 2'-fluoroadenosine-3'-phosphate
  modified_base 9: mod_base = OTHER; note = 2'-fluorocytidine-3'-phosphate
  modified_base 10: mod_base = OTHER; note = 2'-O-methyladenosine-3'-phosphate
  modified_base 11: mod_base = OTHER; note = 2'-O-methyladenosine-3'-phosphate
  modified_base 12: mod_base = OTHER; note = 2'-O-methyladenosine-3'-phosphate
  modified_base 13: mod_base = OTHER; note = 2'-O-methyladenosine-3'-phosphate
  modified_base 14: mod_base = OTHER; note = 2'-fluorouridine-3'-phosphate
  modified_base 15: mod_base = OTHER; note = 2'-O-methyladenosine-3'-phosphate
  modified_base 16: mod_base = OTHER; note = 2'-fluoroadenosine-3'-phosphate
  modified_base 17: mod_base = OTHER; note = 2'-O-methylguanosine-3'-phosphate
  modified_base 18: mod_base = OTHER; note = 2'-O-methyladenosine-3'-phosphate
  modified_base 19: mod_base = OTHER; note = 2'-O-methyluridine-3'-phosphate
  modified_base 20: mod_base = OTHER; note = 2'-O-methylcytidine-3'-phosphate
  modified_base 21: mod_base = OTHER; note = 2'-O-methylcytidine-3'-phosphorothioate
  modified_base 22: mod_base = OTHER; note = 2'-O-methyluridine-3'-phosphorothioate
  modified_base 23: mod_base = OTHER; note = 2'-O-methyluridine-3'-phosphate
atagttcacaaaataagatcctt

SEQ ID NO: 3839 - RNA, 23 nt, synthetic construct
  source 1..23: mol_type = other RNA; note = Description of Artificial Sequence: Synthetic oligonucleotide
  modified_base 1: mod_base = OTHER; note = 2'-O-methyladenosine-3'-phosphorothioate
  modified_base 2: mod_base = OTHER; note = 2'-fluoroguanosine-3'-phosphorothioate
  modified_base 3: mod_base = OTHER; note = 2'-O-methyluridine-3'-phosphate
  modified_base 4: mod_base = OTHER; note = 2'-O-methyluridine-3'-phosphate
  modified_base 5: mod_base = OTHER; note = 2'-O-methylcytidine-3'-phosphate
  modified_base 6: mod_base = OTHER; note = 2'-fluoroadenosine-3'-phosphate
  modified_base 7: mod_base = OTHER; note = 2'-O-methylcytidine-3'-phosphate
  modified_base 8: mod_base = OTHER; note = 2'-fluoroadenosine-3'-phosphate
  modified_base 9: mod_base = OTHER; note = 2'-fluoroadenosine-3'-phosphate
  modified_base 10: mod_base = OTHER; note = 2'-O-methyladenosine-3'-phosphate
  modified_base 11: mod_base = OTHER; note = 2'-O-methyladenosine-3'-phosphate
  modified_base 12: mod_base = OTHER; note = 2'-O-methyluridine-3'-phosphate
  modified_base 13: mod_base = OTHER; note = 2'-O-methyladenosine-3'-phosphate
  modified_base 14: mod_base = OTHER; note = 2'-fluoroadenosine-3'-phosphate
  modified_base 15: mod_base = OTHER; note = 2'-O-methylguanosine-3'-phosphate
  modified_base 16: mod_base = OTHER; note = 2'-fluoroadenosine-3'-phosphate
  modified_base 17: mod_base = OTHER; note = 2'-O-methyluridine-3'-phosphate
  modified_base 18: mod_base = OTHER; note = 2'-O-methylcytidine-3'-phosphate
  modified_base 19: mod_base = OTHER; note = 2'-O-methylcytidine-3'-phosphate
  modified_base 20: mod_base = OTHER; note = 2'-O-methyluridine-3'-phosphate
  modified_base 21: mod_base = OTHER; note = 2'-O-methyluridine-3'-phosphorothioate
  modified_base 22: mod_base = OTHER; note = 2'-O-methyluridine-3'-phosphorothioate
  modified_base 23: mod_base = OTHER; note = 2'-O-methylguanosine-3'-phosphate
agttcacaaaataagatcctttg

SEQ ID NO: 3840 - RNA, 23 nt, synthetic construct
  source 1..23: mol_type = other RNA; note = Description of Artificial Sequence: Synthetic oligonucleotide
  modified_base 1: mod_base = OTHER; note = 2'-O-methyluridine-3'-phosphorothioate
  modified_base 2: mod_base = OTHER; note = 2'-fluoroadenosine-3'-phosphorothioate
  modified_base 3: mod_base = OTHER; note = 2'-O-methyladenosine-3'-phosphate
  modified_base 4: mod_base = OTHER; note = 2'-O-methyluridine-3'-phosphate
  modified_base 5: mod_base = OTHER; note = 2'-O-methyluridine-3'-phosphate
  modified_base 6: mod_base = OTHER; note = 2'-fluoroadenosine-3'-phosphate
  modified_base 7: mod_base = OTHER; note = 2'-O-methyluridine-3'-phosphate
  modified_base 8: mod_base = OTHER; note = 2'-fluoroguanosine-3'-phosphate
  modified_base 9: mod_base = OTHER; note = 2'-fluorocytidine-3'-phosphate
  modified_base 10: mod_base = OTHER; note = 2'-O-methyladenosine-3'-phosphate
  modified_base 11: mod_base = OTHER; note = 2'-O-methylcytidine-3'-phosphate
  modified_base 12: mod_base = OTHER; note = 2'-O-methyladenosine-3'-phosphate
  modified_base 13: mod_base = OTHER; note = 2'-O-methyladenosine-3'-phosphate
  modified_base 14: mod_base = OTHER; note = 2'-fluoroguanosine-3'-phosphate
  modified_base 15: mod_base = OTHER; note = 2'-O-methyladenosine-3'-phosphate
  modified_base 16: mod_base = OTHER; note = 2'-fluorocytidine-3'-phosphate
  modified_base 17: mod_base = OTHER; note = 2'-O-methyladenosine-3'-phosphate
  modified_base 18: mod_base = OTHER; note = 2'-O-methyluridine-3'-phosphate
  modified_base 19: mod_base = OTHER; note = 2'-O-methylguanosine-3'-phosphate
  modified_base 20: mod_base = OTHER; note = 2'-O-methyladenosine-3'-phosphate
  modified_base 21: mod_base = OTHER; note = 2'-O-methyluridine-3'-phosphorothioate
  modified_base 22: mod_base = OTHER; note = 2'-O-methyladenosine-3'-phosphorothioate
  modified_base 23: mod_base = OTHER; note = 2'-O-methyluridine-3'-phosphate
taattatgcacaagacatgatat

SEQ ID NO: 3841 - RNA, 23 nt, synthetic construct
  source 1..23: mol_type = other RNA; note = Description of Artificial Sequence: Synthetic oligonucleotide
  modified_base 1: mod_base = OTHER; note = 2'-O-methyladenosine-3'-phosphorothioate
  modified_base 2: mod_base = OTHER; note = 2'-fluoroguanosine-3'-phosphorothioate
  modified_base 3: mod_base = OTHER; note = 2'-O-methyladenosine-3'-phosphate
  modified_base 4: mod_base = OTHER; note = 2'-O-methylcytidine-3'-phosphate
  modified_base 5: mod_base = OTHER; note = 2'-O-methyladenosine-3'-phosphate
  modified_base 6: mod_base = OTHER; note = 2'-fluoroguanosine-3'-phosphate
  modified_base 7: mod_base = OTHER; note = 2'-O-methyluridine-3'-phosphate
  modified_base 8: mod_base = OTHER; note = 2'-fluoroguanosine-3'-phosphate
  modified_base 9: mod_base = OTHER; note = 2'-fluoroadenosine-3'-phosphate
  modified_base 10: mod_base = OTHER; note = 2'-O-methyladenosine-3'-phosphate
  modified_base 11: mod_base = OTHER; note = 2'-O-methyladenosine-3'-phosphate
  modified_base 12: mod_base = OTHER; note = 2'-O-methyluridine-3'-phosphate
  modified_base 13: mod_base = OTHER; note = 2'-O-methylguanosine-3'-phosphate
  modified_base 14: mod_base = OTHER; note = 2'-fluoroadenosine-3'-phosphate
  modified_base 15: mod_base = OTHER; note = 2'-O-methyluridine-3'-phosphate
  modified_base 16: mod_base = OTHER; note = 2'-fluoroadenosine-3'-phosphate
  modified_base 17: mod_base = OTHER; note = 2'-O-methyluridine-3'-phosphate
  modified_base 18: mod_base = OTHER; note = 2'-O-methylguanosine-3'-phosphate
  modified_base 19: mod_base = OTHER; note = 2'-O-methyladenosine-3'-phosphate
  modified_base 20: mod_base = OTHER; note = 2'-O-methylcytidine-3'-phosphate
  modified_base 21: mod_base = OTHER; note = 2'-O-methyladenosine-3'-phosphorothioate
  modified_base 22: mod_base = OTHER; note = 2'-O-methyluridine-3'-phosphorothioate
  modified_base 23: mod_base = OTHER; note = 2'-O-methylcytidine-3'-phosphate
agacagtgaaatgatatgacatc

SEQ ID NO: 3842 - RNA, 23 nt, synthetic construct
  source 1..23: mol_type = other RNA; note = Description of Artificial Sequence: Synthetic oligonucleotide
  modified_base 1: mod_base = OTHER; note = 2'-O-methyluridine-3'-phosphorothioate
  modified_base 2: mod_base = OTHER; note = 2'-fluorouridine -3'-phosphorothioate
  modified_base 3: mod_base = OTHER; note = 2'-O-methyladenosine-3'-phosphate
  modified_base 4: mod_base = OTHER; note = 2'-O-methylguanosine-3'-phosphate
  modified_base 5: mod_base = OTHER; note = 2'-O-methyladenosine-3'-phosphate
  modified_base 6: mod_base = OTHER; note = 2'-fluorocytidine-3'-phosphate
  modified_base 7: mod_base = OTHER; note = 2'-O-methyladenosine-3'-phosphate
  modified_base 8: mod_base = OTHER; note = 2'-fluoroguanosine-3'-phosphate
  modified_base 9: mod_base = OTHER; note = 2'-fluorouridine-3'-phosphate
  modified_base 10: mod_base = OTHER; note = 2'-O-methylguanosine-3'-phosphate
  modified_base 11: mod_base = OTHER; note = 2'-O-methyladenosine-3'-phosphate
  modified_base 12: mod_base = OTHER; note = 2'-O-methyladenosine-3'-phosphate
  modified_base 13: mod_base = OTHER; note = 2'-O-methyladenosine-3'-phosphate
  modified_base 14: mod_base = OTHER; note = 2'-fluorouridine-3'-phosphate
  modified_base 15: mod_base = OTHER; note = 2'-O-methylguanosine-3'-phosphate
  modified_base 16: mod_base = OTHER; note = 2'-fluoroadenosine-3'-phosphate
  modified_base 17: mod_base = OTHER; note = 2'-O-methyluridine-3'-phosphate
  modified_base 18: mod_base = OTHER; note = 2'-O-methyladenosine-3'-phosphate
  modified_base 19: mod_base = OTHER; note = 2'-O-methyluridine-3'-phosphate
  modified_base 20: mod_base = OTHER; note = 2'-O-methylguanosine-3'-phosphate
  modified_base 21: mod_base = OTHER; note = 2'-O-methyladenosine-3'-phosphorothioate
  modified_base 22: mod_base = OTHER; note = 2'-O-methylcytidine-3'-phosphorothioate
  modified_base 23: mod_base = OTHER; note = 2'-O-methyladenosine-3'-phosphate
ttagacagtgaaatgatatgaca

SEQ ID NO: 3843 - RNA, 23 nt, synthetic construct
  source 1..23: mol_type = other RNA; note = Description of Artificial Sequence: Synthetic oligonucleotide
  modified_base 1: mod_base = OTHER; note = 2'-O-methyluridine-3'-phosphorothioate
  modified_base 2: mod_base = OTHER; note = 2'-fluorouridine -3'-phosphorothioate
  modified_base 3: mod_base = OTHER; note = 2'-O-methylcytidine-3'-phosphate
  modified_base 4: mod_base = OTHER; note = 2'-O-methylcytidine-3'-phosphate
  modified_base 5: mod_base = OTHER; note = 2'-O-methyluridine-3'-phosphate
  modified_base 6: mod_base = OTHER; note = 2'-fluorouridine-3'-phosphate
  modified_base 7: mod_base = OTHER; note = 2'-O-methyluridine-3'-phosphate
  modified_base 8: mod_base = OTHER; note = 2'-fluoroadenosine-3'-phosphate
  modified_base 9: mod_base = OTHER; note = 2'-fluoroguanosine-3'-phosphate
  modified_base 10: mod_base = OTHER; note = 2'-O-methyladenosine-3'-phosphate
  modified_base 11: mod_base = OTHER; note = 2'-O-methyladenosine-3'-phosphate
  modified_base 12: mod_base = OTHER; note = 2'-O-methylguanosine-3'-phosphate
  modified_base 13: mod_base = OTHER; note = 2'-O-methyladenosine-3'-phosphate
  modified_base 14: mod_base = OTHER; note = 2'-fluorouridine-3'-phosphate
  modified_base 15: mod_base = OTHER; note = 2'-O-methyluridine-3'-phosphate
  modified_base 16: mod_base = OTHER; note = 2'-fluoroadenosine-3'-phosphate
  modified_base 17: mod_base = OTHER; note = 2'-O-methyluridine-3'-phosphate
  modified_base 18: mod_base = OTHER; note = 2'-O-methyladenosine-3'-phosphate
  modified_base 19: mod_base = OTHER; note = 2'-O-methyladenosine-3'-phosphate
  modified_base 20: mod_base = OTHER; note = 2'-O-methyladenosine-3'-phosphate
  modified_base 21: mod_base = OTHER; note = 2'-O-methyluridine-3'-phosphorothioate
  modified_base 22: mod_base = OTHER; note = 2'-O-methylcytidine-3'-phosphorothioate
  modified_base 23: mod_base = OTHER; note = 2'-O-methyladenosine-3'-phosphate
ttcctttagaagattataaatca

SEQ ID NO: 3844 - RNA, 23 nt, synthetic construct
  source 1..23: mol_type = other RNA; note = Description of Artificial Sequence: Synthetic oligonucleotide
  modified_base 1: mod_base = OTHER; note = 2'-O-methyladenosine-3'-phosphorothioate
  modified_base 2: mod_base = OTHER; note = 2'-fluoroguanosine-3'-phosphorothioate
  modified_base 3: mod_base = OTHER; note = 2'-O-methylcytidine-3'-phosphate
  modified_base 4: mod_base = OTHER; note = 2'-O-methyluridine-3'-phosphate
  modified_base 5: mod_base = OTHER; note = 2'-O-methylguanosine-3'-phosphate
  modified_base 6: mod_base = OTHER; note = 2'-fluorouridine-3'-phosphate
  modified_base 7: mod_base = OTHER; note = 2'-O-methylguanosine-3'-phosphate
  modified_base 8: mod_base = OTHER; note = 2'-fluoroguanosine-3'-phosphate
  modified_base 9: mod_base = OTHER; note = 2'-fluoroadenosine-3'-phosphate
  modified_base 10: mod_base = OTHER; note = 2'-O-methyluridine-3'-phosphate
  modified_base 11: mod_base = OTHER; note = 2'-O-methyluridine-3'-phosphate
  modified_base 12: mod_base = OTHER; note = 2'-O-methyluridine-3'-phosphate
  modified_base 13: mod_base = OTHER; note = 2'-O-methyluridine-3'-phosphate
  modified_base 14: mod_base = OTHER; note = 2'-fluoroadenosine-3'-phosphate
  modified_base 15: mod_base = OTHER; note = 2'-O-methylcytidine-3'-phosphate
  modified_base 16: mod_base = OTHER; note = 2'-fluoroadenosine-3'-phosphate
  modified_base 17: mod_base = OTHER; note = 2'-O-methyladenosine-3'-phosphate
  modified_base 18: mod_base = OTHER; note = 2'-O-methyladenosine-3'-phosphate
  modified_base 19: mod_base = OTHER; note = 2'-O-methylcytidine-3'-phosphate
  modified_base 20: mod_base = OTHER; note = 2'-O-methylcytidine-3'-phosphate
  modified_base 21: mod_base = OTHER; note = 2'-O-methyladenosine-3'-phosphorothioate
  modified_base 22: mod_base = OTHER; note = 2'-O-methyluridine-3'-phosphorothioate
  modified_base 23: mod_base = OTHER; note = 2'-O-methyluridine-3'-phosphate
agctgtggattttacaaaccatt

SEQ ID NO: 3845 - RNA, 23 nt, synthetic construct
  source 1..23: mol_type = other RNA; note = Description of Artificial Sequence: Synthetic oligonucleotide
  modified_base 1: mod_base = OTHER; note = 2'-O-methyladenosine-3'-phosphorothioate
  modified_base 2: mod_base = OTHER; note = 2'-fluoroadenosine-3'-phosphorothioate
  modified_base 3: mod_base = OTHER; note = 2'-O-methylguanosine-3'-phosphate
  modified_base 4: mod_base = OTHER; note = 2'-O-methyladenosine-3'-phosphate
  modified_base 5: mod_base = OTHER; note = 2'-O-methyluridine-3'-phosphate
  modified_base 6: mod_base = OTHER; note = 2'-fluorouridine-3'-phosphate
  modified_base 7: mod_base = OTHER; note = 2'-O-methyladenosine-3'-phosphate
  modified_base 8: mod_base = OTHER; note = 2'-fluoroadenosine-3'-phosphate
  modified_base 9: mod_base = OTHER; note = 2'-fluorouridine-3'-phosphate
  modified_base 10: mod_base = OTHER; note = 2'-O-methyladenosine-3'-phosphate
  modified_base 11: mod_base = OTHER; note = 2'-O-methylcytidine-3'-phosphate
  modified_base 12: mod_base = OTHER; note = 2'-O-methylcytidine-3'-phosphate
  modified_base 13: mod_base = OTHER; note = 2'-O-methyladenosine-3'-phosphate
  modified_base 14: mod_base = OTHER; note = 2'-fluorouridine-3'-phosphate
  modified_base 15: mod_base = OTHER; note = 2'-O-methylcytidine-3'-phosphate
  modified_base 16: mod_base = OTHER; note = 2'-fluorocytidine-3'-phosphate
  modified_base 17: mod_base = OTHER; note = 2'-O-methyladenosine-3'-phosphate
  modified_base 18: mod_base = OTHER; note = 2'-O-methylguanosine-3'-phosphate
  modified_base 19: mod_base = OTHER; note = 2'-O-methylcytidine-3'-phosphate
  modified_base 20: mod_base = OTHER; note = 2'-O-methyladenosine-3'-phosphate
  modified_base 21: mod_base = OTHER; note = 2'-O-methyluridine-3'-phosphorothioate
  modified_base 22: mod_base = OTHER; note = 2'-O-methylcytidine-3'-phosphorothioate
  modified_base 23: mod_base = OTHER; note = 2'-O-methyladenosine-3'-phosphate
aagattaataccatccagcatca

SEQ ID NO: 3846 - RNA, 23 nt, synthetic construct
  source 1..23: mol_type = other RNA; note = Description of Artificial Sequence: Synthetic oligonucleotide
  modified_base 1: mod_base = OTHER; note = 2'-O-methyladenosine-3'-phosphorothioate
  modified_base 2: mod_base = OTHER; note = 2'-fluorouridine -3'-phosphorothioate
  modified_base 3: mod_base = OTHER; note = 2'-O-methylguanosine-3'-phosphate
  modified_base 4: mod_base = OTHER; note = 2'-O-methyluridine-3'-phosphate
  modified_base 5: mod_base = OTHER; note = 2'-O-methyladenosine-3'-phosphate
  modified_base 6: mod_base = OTHER; note = 2'-fluorocytidine-3'-phosphate
  modified_base 7: mod_base = OTHER; note = 2'-O-methyladenosine-3'-phosphate
  modified_base 8: mod_base = OTHER; note = 2'-fluorocytidine-3'-phosphate
  modified_base 9: mod_base = OTHER; note = 2'-fluorouridine-3'-phosphate
  modified_base 10: mod_base = OTHER; note = 2'-O-methyladenosine-3'-phosphate
  modified_base 11: mod_base = OTHER; note = 2'-O-methylcytidine-3'-phosphate
  modified_base 12: mod_base = OTHER; note = 2'-O-methyluridine-3'-phosphate
  modified_base 13: mod_base = OTHER; note = 2'-O-methylguanosine-3'-phosphate
  modified_base 14: mod_base = OTHER; note = 2'-fluoroadenosine-3'-phosphate
  modified_base 15: mod_base = OTHER; note = 2'-O-methyluridine-3'-phosphate
  modified_base 16: mod_base = OTHER; note = 2'-fluoroadenosine-3'-phosphate
  modified_base 17: mod_base = OTHER; note = 2'-O-methyluridine-3'-phosphate
  modified_base 18: mod_base = OTHER; note = 2'-O-methyladenosine-3'-phosphate
  modified_base 19: mod_base = OTHER; note = 2'-O-methylguanosine-3'-phosphate
  modified_base 20: mod_base = OTHER; note = 2'-O-methyluridine-3'-phosphate
  modified_base 21: mod_base = OTHER; note = 2'-O-methyluridine-3'-phosphorothioate
  modified_base 22: mod_base = OTHER; note = 2'-O-methylcytidine-3'-phosphorothioate
  modified_base 23: mod_base = OTHER; note = 2'-O-methyladenosine-3'-phosphate
atgtacactactgatatagttca

SEQ ID NO: 3847 - RNA, 23 nt, synthetic construct
  source 1..23: mol_type = other RNA; note = Description of Artificial Sequence: Synthetic oligonucleotide
  modified_base 1: mod_base = OTHER; note = 2'-O-methyluridine-3'-phosphorothioate
  modified_base 2: mod_base = OTHER; note = 2'-fluorouridine -3'-phosphorothioate
  modified_base 3: mod_base = OTHER; note = 2'-O-methyluridine-3'-phosphate
  modified_base 4: mod_base = OTHER; note = 2'-O-methylcytidine-3'-phosphate
  modified_base 5: mod_base = OTHER; note = 2'-O-methyluridine-3'-phosphate
  modified_base 6: mod_base = OTHER; note = 2'-fluoroadenosine-3'-phosphate
  modified_base 7: mod_base = OTHER; note = 2'-O-methyladenosine-3'-phosphate
  modified_base 8: mod_base = OTHER; note = 2'-fluorocytidine-3'-phosphate
  modified_base 9: mod_base = OTHER; note = 2'-fluorouridine-3'-phosphate
  modified_base 10: mod_base = OTHER; note = 2'-O-methyluridine-3'-phosphate
  modified_base 11: mod_base = OTHER; note = 2'-O-methylcytidine-3'-phosphate
  modified_base 12: mod_base = OTHER; note = 2'-O-methyladenosine-3'-phosphate
  modified_base 13: mod_base = OTHER; note = 2'-O-methylguanosine-3'-phosphate
  modified_base 14: mod_base = OTHER; note = 2'-fluoroguanosine-3'-phosphate
  modified_base 15: mod_base = OTHER; note = 2'-O-methyladenosine-3'-phosphate
  modified_base 16: mod_base = OTHER; note = 2'-fluoroguanosine-3'-phosphate
  modified_base 17: mod_base = OTHER; note = 2'-O-methyluridine-3'-phosphate
  modified_base 18: mod_base = OTHER; note = 2'-O-methyluridine-3'-phosphate
  modified_base 19: mod_base = OTHER; note = 2'-O-methylguanosine-3'-phosphate
  modified_base 20: mod_base = OTHER; note = 2'-O-methyladenosine-3'-phosphate
  modified_base 21: mod_base = OTHER; note = 2'-O-methyluridine-3'-phosphorothioate
  modified_base 22: mod_base = OTHER; note = 2'-O-methylguanosine-3'-phosphorothioate
  modified_base 23: mod_base = OTHER; note = 2'-O-methyluridine-3'-phosphate
tttctaacttcaggagttgatgt

SEQ ID NO: 3848 - RNA, 23 nt, synthetic construct
  source 1..23: mol_type = other RNA; note = Description of Artificial Sequence: Synthetic oligonucleotide
  modified_base 1: mod_base = OTHER; note = 2'-O-methyluridine-3'-phosphorothioate
  modified_base 2: mod_base = OTHER; note = 2'-fluoroadenosine-3'-phosphorothioate
  modified_base 3: mod_base = OTHER; note = 2'-O-methylcytidine-3'-phosphate
  modified_base 4: mod_base = OTHER; note = 2'-O-methyladenosine-3'-phosphate
  modified_base 5: mod_base = OTHER; note = 2'-O-methyladenosine-3'-phosphate
  modified_base 6: mod_base = OTHER; note = 2'-fluoroguanosine-3'-phosphate
  modified_base 7: mod_base = OTHER; note = 2'-O-methyladenosine-3'-phosphate
  modified_base 8: mod_base = OTHER; note = 2'-fluorouridine-3'-phosphate
  modified_base 9: mod_base = OTHER; note = 2'-fluorouridine-3'-phosphate
  modified_base 10: mod_base = OTHER; note = 2'-O-methyladenosine-3'-phosphate
  modified_base 11: mod_base = OTHER; note = 2'-O-methyladenosine-3'-phosphate
  modified_base 12: mod_base = OTHER; note = 2'-O-methyluridine-3'-phosphate
  modified_base 13: mod_base = OTHER; note = 2'-O-methyladenosine-3'-phosphate
  modified_base 14: mod_base = OTHER; note = 2'-fluorocytidine-3'-phosphate
  modified_base 15: mod_base = OTHER; note = 2'-O-methylcytidine-3'-phosphate
  modified_base 16: mod_base = OTHER; note = 2'-fluoroadenosine-3'-phosphate
  modified_base 17: mod_base = OTHER; note = 2'-O-methyluridine-3'-phosphate
  modified_base 18: mod_base = OTHER; note = 2'-O-methylcytidine-3'-phosphate
  modified_base 19: mod_base = OTHER; note = 2'-O-methylcytidine-3'-phosphate
  modified_base 20: mod_base = OTHER; note = 2'-O-methyladenosine-3'-phosphate
  modified_base 21: mod_base = OTHER; note = 2'-O-methylguanosine-3'-phosphorothioate
  modified_base 22: mod_base = OTHER; note = 2'-O-methylcytidine-3'-phosphorothioate
  modified_base 23: mod_base = OTHER; note = 2'-O-methyladenosine-3'-phosphate
tacaagattaataccatccagca

SEQ ID NO: 3849 - RNA, 23 nt, synthetic construct
  source 1..23: mol_type = other RNA; note = Description of Artificial Sequence: Synthetic oligonucleotide
  modified_base 1: mod_base = OTHER; note = 2'-O-methyladenosine-3'-phosphorothioate
  modified_base 2: mod_base = OTHER; note = 2'-fluoroguanosine-3'-phosphorothioate
  modified_base 3: mod_base = OTHER; note = 2'-O-methylcytidine-3'-phosphate
  modified_base 4: mod_base = OTHER; note = 2'-O-methylcytidine-3'-phosphate
  modified_base 5: mod_base = OTHER; note = 2'-O-methyluridine-3'-phosphate
  modified_base 6: mod_base = OTHER; note = 2'-fluoroadenosine-3'-phosphate
  modified_base 7: mod_base = OTHER; note = 2'-O-methylguanosine-3'-phosphate
  modified_base 8: mod_base = OTHER; note = 2'-fluoroadenosine-3'-phosphate
  modified_base 9: mod_base = OTHER; note = 2'-fluorocytidine-3'-phosphate
  modified_base 10: mod_base = OTHER; note = 2'-O-methyladenosine-3'-phosphate
  modified_base 11: mod_base = OTHER; note = 2'-O-methylguanosine-3'-phosphate
  modified_base 12: mod_base = OTHER; note = 2'-O-methyluridine-3'-phosphate
  modified_base 13: mod_base = OTHER; note = 2'-O-methylguanosine-3'-phosphate
  modified_base 14: mod_base = OTHER; note = 2'-fluoroadenosine-3'-phosphate
  modified_base 15: mod_base = OTHER; note = 2'-O-methyladenosine-3'-phosphate
  modified_base 16: mod_base = OTHER; note = 2'-fluoroadenosine-3'-phosphate
  modified_base 17: mod_base = OTHER; note = 2'-O-methyluridine-3'-phosphate
  modified_base 18: mod_base = OTHER; note = 2'-O-methylguanosine-3'-phosphate
  modified_base 19: mod_base = OTHER; note = 2'-O-methyladenosine-3'-phosphate
  modified_base 20: mod_base = OTHER; note = 2'-O-methyluridine-3'-phosphate
  modified_base 21: mod_base = OTHER; note = 2'-O-methyladenosine-3'-phosphorothioate
  modified_base 22: mod_base = OTHER; note = 2'-O-methyluridine-3'-phosphorothioate
  modified_base 23: mod_base = OTHER; note = 2'-O-methylguanosine-3'-phosphate
agcctagacagtgaaatgatatg

SEQ ID NO: 3850 - RNA, 23 nt, synthetic construct
  source 1..23: mol_type = other RNA; note = Description of Artificial Sequence: Synthetic oligonucleotide
  modified_base 1: mod_base = OTHER; note = 2'-O-methyluridine-3'-phosphorothioate
  modified_base 2: mod_base = OTHER; note = 2'-fluoroguanosine-3'-phosphorothioate
  modified_base 3: mod_base = OTHER; note = 2'-O-methyladenosine-3'-phosphate
  modified_base 4: mod_base = OTHER; note = 2'-O-methyluridine-3'-phosphate
  modified_base 5: mod_base = OTHER; note = 2'-O-methyladenosine-3'-phosphate
  modified_base 6: mod_base = OTHER; note = 2'-fluorouridine-3'-phosphate
  modified_base 7: mod_base = OTHER; note = 2'-O-methyladenosine-3'-phosphate
  modified_base 8: mod_base = OTHER; note = 2'-fluoroguanosine-3'-phosphate
  modified_base 9: mod_base = OTHER; note = 2'-fluorocytidine-3'-phosphate
  modified_base 10: mod_base = OTHER; note = 2'-O-methyluridine-3'-phosphate
  modified_base 11: mod_base = OTHER; note = 2'-O-methylguanosine-3'-phosphate
  modified_base 12: mod_base = OTHER; note = 2'-O-methyluridine-3'-phosphate
  modified_base 13: mod_base = OTHER; note = 2'-O-methylguanosine-3'-phosphate
  modified_base 14: mod_base = OTHER; note = 2'-fluoroguanosine-3'-phosphate
  modified_base 15: mod_base = OTHER; note = 2'-O-methyladenosine-3'-phosphate
  modified_base 16: mod_base = OTHER; note = 2'-fluorouridine-3'-phosphate
  modified_base 17: mod_base = OTHER; note = 2'-O-methyluridine-3'-phosphate
  modified_base 18: mod_base = OTHER; note = 2'-O-methyluridine-3'-phosphate
  modified_base 19: mod_base = OTHER; note = 2'-O-methyluridine-3'-phosphate
  modified_base 20: mod_base = OTHER; note = 2'-O-methyladenosine-3'-phosphate
  modified_base 21: mod_base = OTHER; note = 2'-O-methylcytidine-3'-phosphorothioate
  modified_base 22: mod_base = OTHER; note = 2'-O-methyladenosine-3'-phosphorothioate
  modified_base 23: mod_base = OTHER; note = 2'-O-methyladenosine-3'-phosphate
tgatatagctgtggattttacaa

SEQ ID NO: 3851 - RNA, 23 nt, synthetic construct
  source 1..23: mol_type = other RNA; note = Description of Artificial Sequence: Synthetic oligonucleotide
  modified_base 1: mod_base = OTHER; note = 2'-O-methyladenosine-3'-phosphorothioate
  modified_base 2: mod_base = OTHER; note = 2'-fluoroadenosine-3'-phosphorothioate
  modified_base 3: mod_base = OTHER; note = 2'-O-methyladenosine-3'-phosphate
  modified_base 4: mod_base = OTHER; note = 2'-O-methyluridine-3'-phosphate
  modified_base 5: mod_base = OTHER; note = 2'-O-methylguanosine-3'-phosphate
  modified_base 6: mod_base = OTHER; note = 2'-fluorocytidine-3'-phosphate
  modified_base 7: mod_base = OTHER; note = 2'-O-methyladenosine-3'-phosphate
  modified_base 8: mod_base = OTHER; note = 2'-fluoroadenosine-3'-phosphate
  modified_base 9: mod_base = OTHER; note = 2'-fluoroguanosine-3'-phosphate
  modified_base 10: mod_base = OTHER; note = 2'-O-methylguanosine-3'-phosphate
  modified_base 11: mod_base = OTHER; note = 2'-O-methyladenosine-3'-phosphate
  modified_base 12: mod_base = OTHER; note = 2'-O-methyladenosine-3'-phosphate
  modified_base 13: mod_base = OTHER; note = 2'-O-methylcytidine-3'-phosphate
  modified_base 14: mod_base = OTHER; note = 2'-fluoroadenosine-3'-phosphate
  modified_base 15: mod_base = OTHER; note = 2'-O-methylcytidine-3'-phosphate
  modified_base 16: mod_base = OTHER; note = 2'-fluorouridine-3'-phosphate
  modified_base 17: mod_base = OTHER; note = 2'-O-methyladenosine-3'-phosphate
  modified_base 18: mod_base = OTHER; note = 2'-O-methyladenosine-3'-phosphate
  modified_base 19: mod_base = OTHER; note = 2'-O-methylguanosine-3'-phosphate
  modified_base 20: mod_base = OTHER; note = 2'-O-methylguanosine-3'-phosphate
  modified_base 21: mod_base = OTHER; note = 2'-O-methyladenosine-3'-phosphorothioate
  modified_base 22: mod_base = OTHER; note = 2'-O-methyladenosine-3'-phosphorothioate
  modified_base 23: mod_base = OTHER; note = 2'-O-methylguanosine-3'-phosphate
aaatgcaaggaacactaaggaag

SEQ ID NO: 3852 - RNA, 23 nt, synthetic construct
  source 1..23: mol_type = other RNA; note = Description of Artificial Sequence: Synthetic oligonucleotide
  modified_base 1: mod_base = OTHER; note = 2'-O-methyluridine-3'-phosphorothioate
  modified_base 2: mod_base = OTHER; note = 2'-fluorocytidine-3'-phosphorothioate
  modified_base 3: mod_base = OTHER; note = 2'-O-methyluridine-3'-phosphate
  modified_base 4: mod_base = OTHER; note = 2'-O-methyladenosine-3'-phosphate
  modified_base 5: mod_base = OTHER; note = 2'-O-methylguanosine-3'-phosphate
  modified_base 6: mod_base = OTHER; note = 2'-fluoroadenosine-3'-phosphate
  modified_base 7: mod_base = OTHER; note = 2'-O-methylcytidine-3'-phosphate
  modified_base 8: mod_base = OTHER; note = 2'-fluoroadenosine-3'-phosphate
  modified_base 9: mod_base = OTHER; note = 2'-fluoroguanosine-3'-phosphate
  modified_base 10: mod_base = OTHER; note = 2'-O-methyluridine-3'-phosphate
  modified_base 11: mod_base = OTHER; note = 2'-O-methylguanosine-3'-phosphate
  modified_base 12: mod_base = OTHER; note = 2'-O-methyladenosine-3'-phosphate
  modified_base 13: mod_base = OTHER; note = 2'-O-methyladenosine-3'-phosphate
  modified_base 14: mod_base = OTHER; note = 2'-fluoroadenosine-3'-phosphate
  modified_base 15: mod_base = OTHER; note = 2'-O-methyluridine-3'-phosphate
  modified_base 16: mod_base = OTHER; note = 2'-fluoroguanosine-3'-phosphate
  modified_base 17: mod_base = OTHER; note = 2'-O-methyladenosine-3'-phosphate
  modified_base 18: mod_base = OTHER; note = 2'-O-methyluridine-3'-phosphate
  modified_base 19: mod_base = OTHER; note = 2'-O-methyladenosine-3'-phosphate
  modified_base 20: mod_base = OTHER; note = 2'-O-methyluridine-3'-phosphate
  modified_base 21: mod_base = OTHER; note = 2'-O-methylguanosine-3'-phosphorothioate
  modified_base 22: mod_base = OTHER; note = 2'-O-methyladenosine-3'-phosphorothioate
  modified_base 23: mod_base = OTHER; note = 2'-O-methylcytidine-3'-phosphate
tctagacagtgaaatgatatgac

SEQ ID NO: 3853 - RNA, 23 nt, synthetic construct
  source 1..23: mol_type = other RNA; note = Description of Artificial Sequence: Synthetic oligonucleotide
  modified_base 1: mod_base = OTHER; note = 2'-O-methyluridine-3'-phosphorothioate
  modified_base 2: mod_base = OTHER; note = 2'-fluorouridine -3'-phosphorothioate
  modified_base 3: mod_base = OTHER; note = 2'-O-methyladenosine-3'-phosphate
  modified_base 4: mod_base = OTHER; note = 2'-O-methyladenosine-3'-phosphate
  modified_base 5: mod_base = OTHER; note = 2'-O-methylcytidine-3'-phosphate
  modified_base 6: mod_base = OTHER; note = 2'-fluorouridine-3'-phosphate
  modified_base 7: mod_base = OTHER; note = 2'-O-methyluridine-3'-phosphate
  modified_base 8: mod_base = OTHER; note = 2'-fluorocytidine-3'-phosphate
  modified_base 9: mod_base = OTHER; note = 2'-fluoroadenosine-3'-phosphate
  modified_base 10: mod_base = OTHER; note = 2'-O-methylguanosine-3'-phosphate
  modified_base 11: mod_base = OTHER; note = 2'-O-methylguanosine-3'-phosphate
  modified_base 12: mod_base = OTHER; note = 2'-O-methyladenosine-3'-phosphate
  modified_base 13: mod_base = OTHER; note = 2'-O-methylguanosine-3'-phosphate
  modified_base 14: mod_base = OTHER; note = 2'-fluorouridine-3'-phosphate
  modified_base 15: mod_base = OTHER; note = 2'-O-methyluridine-3'-phosphate
  modified_base 16: mod_base = OTHER; note = 2'-fluoroguanosine-3'-phosphate
  modified_base 17: mod_base = OTHER; note = 2'-O-methyladenosine-3'-phosphate
  modified_base 18: mod_base = OTHER; note = 2'-O-methyluridine-3'-phosphate
  modified_base 19: mod_base = OTHER; note = 2'-O-methylguanosine-3'-phosphate
  modified_base 20: mod_base = OTHER; note = 2'-O-methyluridine-3'-phosphate
  modified_base 21: mod_base = OTHER; note = 2'-O-methyluridine-3'-phosphorothioate
  modified_base 22: mod_base = OTHER; note = 2'-O-methyluridine-3'-phosphorothioate
  modified_base 23: mod_base = OTHER; note = 2'-O-methyluridine-3'-phosphate
ttaacttcaggagttgatgtttt

SEQ ID NO: 3854 - RNA, 23 nt, synthetic construct
  source 1..23: mol_type = other RNA; note = Description of Artificial Sequence: Synthetic oligonucleotide
  modified_base 1: mod_base = OTHER; note = 2'-O-methyluridine-3'-phosphorothioate
  modified_base 2: mod_base = OTHER; note = 2'-fluorouridine -3'-phosphorothioate
  modified_base 3: mod_base = OTHER; note = 2'-O-methyladenosine-3'-phosphate
  modified_base 4: mod_base = OTHER; note = 2'-O-methyladenosine-3'-phosphate
  modified_base 5: mod_base = OTHER; note = 2'-O-methyluridine-3'-phosphate
  modified_base 6: mod_base = OTHER; note = 2'-fluoroadenosine-3'-phosphate
  modified_base 7: mod_base = OTHER; note = 2'-O-methylcytidine-3'-phosphate
  modified_base 8: mod_base = OTHER; note = 2'-fluorocytidine-3'-phosphate
  modified_base 9: mod_base = OTHER; note = 2'-fluoroadenosine-3'-phosphate
  modified_base 10: mod_base = OTHER; note = 2'-O-methyluridine-3'-phosphate
  modified_base 11: mod_base = OTHER; note = 2'-O-methylcytidine-3'-phosphate
  modified_base 12: mod_base = OTHER; note = 2'-O-methylcytidine-3'-phosphate
  modified_base 13: mod_base = OTHER; note = 2'-O-methyladenosine-3'-phosphate
  modified_base 14: mod_base = OTHER; note = 2'-fluoroguanosine-3'-phosphate
  modified_base 15: mod_base = OTHER; note = 2'-O-methylcytidine-3'-phosphate
  modified_base 16: mod_base = OTHER; note = 2'-fluoroadenosine-3'-phosphate
  modified_base 17: mod_base = OTHER; note = 2'-O-methyluridine-3'-phosphate
  modified_base 18: mod_base = OTHER; note = 2'-O-methylcytidine-3'-phosphate
  modified_base 19: mod_base = OTHER; note = 2'-O-methyladenosine-3'-phosphate
  modified_base 20: mod_base = OTHER; note = 2'-O-methylguanosine-3'-phosphate
  modified_base 21: mod_base = OTHER; note = 2'-O-methylguanosine-3'-phosphorothioate
  modified_base 22: mod_base = OTHER; note = 2'-O-methyladenosine-3'-phosphorothioate
  modified_base 23: mod_base = OTHER; note = 2'-O-methyluridine-3'-phosphate
ttaataccatccagcatcaggat

SEQ ID NO: 3855 - RNA, 23 nt, synthetic construct
  source 1..23: mol_type = other RNA; note = Description of Artificial Sequence: Synthetic oligonucleotide
  modified_base 1: mod_base = OTHER; note = 2'-O-methyladenosine-3'-phosphorothioate
  modified_base 2: mod_base = OTHER; note = 2'-fluorocytidine-3'-phosphorothioate
  modified_base 3: mod_base = OTHER; note = 2'-O-methyluridine-3'-phosphate
  modified_base 4: mod_base = OTHER; note = 2'-O-methyluridine-3'-phosphate
  modified_base 5: mod_base = OTHER; note = 2'-O-methylguanosine-3'-phosphate
  modified_base 6: mod_base = OTHER; note = 2'-fluoroguanosine-3'-phosphate
  modified_base 7: mod_base = OTHER; note = 2'-O-methyladenosine-3'-phosphate
  modified_base 8: mod_base = OTHER; note = 2'-fluorouridine-3'-phosphate
  modified_base 9: mod_base = OTHER; note = 2'-fluoroadenosine-3'-phosphate
  modified_base 10: mod_base = OTHER; note = 2'-O-methylguanosine-3'-phosphate
  modified_base 11: mod_base = OTHER; note = 2'-O-methyluridine-3'-phosphate
  modified_base 12: mod_base = OTHER; note = 2'-O-methyluridine-3'-phosphate
  modified_base 13: mod_base = OTHER; note = 2'-O-methylguanosine-3'-phosphate
  modified_base 14: mod_base = OTHER; note = 2'-fluoroguanosine-3'-phosphate
  modified_base 15: mod_base = OTHER; note = 2'-O-methyluridine-3'-phosphate
  modified_base 16: mod_base = OTHER; note = 2'-fluorouridine-3'-phosphate
  modified_base 17: mod_base = OTHER; note = 2'-O-methylguanosine-3'-phosphate
  modified_base 18: mod_base = OTHER; note = 2'-O-methylcytidine-3'-phosphate
  modified_base 19: mod_base = OTHER; note = 2'-O-methyladenosine-3'-phosphate
  modified_base 20: mod_base = OTHER; note = 2'-O-methyluridine-3'-phosphate
  modified_base 21: mod_base = OTHER; note = 2'-O-methyluridine-3'-phosphorothioate
  modified_base 22: mod_base = OTHER; note = 2'-O-methylguanosine-3'-phosphorothioate
  modified_base 23: mod_base = OTHER; note = 2'-O-methyluridine-3'-phosphate
acttggatagttggttgcattgt

SEQ ID NO: 3856 - RNA, 23 nt, synthetic construct
  source 1..23: mol_type = other RNA; note = Description of Artificial Sequence: Synthetic oligonucleotide
  modified_base 1: mod_base = OTHER; note = 2'-O-methyluridine-3'-phosphorothioate
  modified_base 2: mod_base = OTHER; note = 2'-fluoroadenosine-3'-phosphorothioate
  modified_base 3: mod_base = OTHER; note = 2'-O-methyluridine-3'-phosphate
  modified_base 4: mod_base = OTHER; note = 2'-O-methylcytidine-3'-phosphate
  modified_base 5: mod_base = OTHER; note = 2'-O-methyladenosine-3'-phosphate
  modified_base 6: mod_base = OTHER; note = 2'-fluorouridine-3'-phosphate
  modified_base 7: mod_base = OTHER; note = 2'-O-methylcytidine-3'-phosphate
  modified_base 8: mod_base = OTHER; note = 2'-fluorocytidine-3'-phosphate
  modified_base 9: mod_base = OTHER; note = 2'-fluorouridine-3'-phosphate
  modified_base 10: mod_base = OTHER; note = 2'-O-methyluridine-3'-phosphate
  modified_base 11: mod_base = OTHER; note = 2'-O-methyluridine-3'-phosphate
  modified_base 12: mod_base = OTHER; note = 2'-O-methyladenosine-3'-phosphate
  modified_base 13: mod_base = OTHER; note = 2'-O-methyluridine-3'-phosphate
  modified_base 14: mod_base = OTHER; note = 2'-fluorouridine-3'-phosphate
  modified_base 15: mod_base = OTHER; note = 2'-O-methylcytidine-3'-phosphate
  modified_base 16: mod_base = OTHER; note = 2'-fluorocytidine-3'-phosphate
  modified_base 17: mod_base = OTHER; note = 2'-O-methylguanosine-3'-phosphate
  modified_base 18: mod_base = OTHER; note = 2'-O-methyluridine-3'-phosphate
  modified_base 19: mod_base = OTHER; note = 2'-O-methyladenosine-3'-phosphate
  modified_base 20: mod_base = OTHER; note = 2'-O-methyladenosine-3'-phosphate
  modified_base 21: mod_base = OTHER; note = 2'-O-methyladenosine-3'-phosphorothioate
  modified_base 22: mod_base = OTHER; note = 2'-O-methylguanosine-3'-phosphorothioate
  modified_base 23: mod_base = OTHER; note = 2'-O-methyladenosine-3'-phosphate
tatcatcctttattccgtaaaga

SEQ ID NO: 3857 - RNA, 23 nt, synthetic construct
  source 1..23: mol_type = other RNA; note = Description of Artificial Sequence: Synthetic oligonucleotide
  modified_base 1: mod_base = OTHER; note = 2'-O-methyladenosine-3'-phosphorothioate
  modified_base 2: mod_base = OTHER; note = 2'-fluoroadenosine-3'-phosphorothioate
  modified_base 3: mod_base = OTHER; note = 2'-O-methyluridine-3'-phosphate
  modified_base 4: mod_base = OTHER; note = 2'-O-methylguanosine-3'-phosphate
  modified_base 5: mod_base = OTHER; note = 2'-O-methylcytidine-3'-phosphate
  modified_base 6: mod_base = OTHER; note = 2'-fluoroadenosine-3'-phosphate
  modified_base 7: mod_base = OTHER; note = 2'-O-methyladenosine-3'-phosphate
  modified_base 8: mod_base = OTHER; note = 2'-fluoroguanosine-3'-phosphate
  modified_base 9: mod_base = OTHER; note = 2'-fluoroguanosine-3'-phosphate
  modified_base 10: mod_base = OTHER; note = 2'-O-methyladenosine-3'-phosphate
  modified_base 11: mod_base = OTHER; note = 2'-O-methyladenosine-3'-phosphate
  modified_base 12: mod_base = OTHER; note = 2'-O-methylcytidine-3'-phosphate
  modified_base 13: mod_base = OTHER; note = 2'-O-methyladenosine-3'-phosphate
  modified_base 14: mod_base = OTHER; note = 2'-fluorocytidine-3'-phosphate
  modified_base 15: mod_base = OTHER; note = 2'-O-methyluridine-3'-phosphate
  modified_base 16: mod_base = OTHER; note = 2'-fluoroadenosine-3'-phosphate
  modified_base 17: mod_base = OTHER; note = 2'-O-methyladenosine-3'-phosphate
  modified_base 18: mod_base = OTHER; note = 2'-O-methylguanosine-3'-phosphate
  modified_base 19: mod_base = OTHER; note = 2'-O-methylguanosine-3'-phosphate
  modified_base 20: mod_base = OTHER; note = 2'-O-methyladenosine-3'-phosphate
  modified_base 21: mod_base = OTHER; note = 2'-O-methyladenosine-3'-phosphorothioate
  modified_base 22: mod_base = OTHER; note = 2'-O-methylguanosine-3'-phosphorothioate
  modified_base 23: mod_base = OTHER; note = 2'-O-methyladenosine-3'-phosphate
aatgcaaggaacactaaggaaga

SEQ ID NO: 3858 - RNA, 23 nt, synthetic construct
  source 1..23: mol_type = other RNA; note = Description of Artificial Sequence: Synthetic oligonucleotide
  modified_base 1: mod_base = OTHER; note = 2'-O-methyluridine-3'-phosphorothioate
  modified_base 2: mod_base = OTHER; note = 2'-fluorouridine -3'-phosphorothioate
  modified_base 3: mod_base = OTHER; note = 2'-O-methyluridine-3'-phosphate
  modified_base 4: mod_base = OTHER; note = 2'-O-methylguanosine-3'-phosphate
  modified_base 5: mod_base = OTHER; note = 2'-O-methylguanosine-3'-phosphate
  modified_base 6: mod_base = OTHER; note = 2'-fluoroadenosine-3'-phosphate
  modified_base 7: mod_base = OTHER; note = 2'-O-methyluridine-3'-phosphate
  modified_base 8: mod_base = OTHER; note = 2'-fluoroadenosine-3'-phosphate
  modified_base 9: mod_base = OTHER; note = 2'-fluoroguanosine-3'-phosphate
  modified_base 10: mod_base = OTHER; note = 2'-O-methyluridine-3'-phosphate
  modified_base 11: mod_base = OTHER; note = 2'-O-methyluridine-3'-phosphate
  modified_base 12: mod_base = OTHER; note = 2'-O-methylguanosine-3'-phosphate
  modified_base 13: mod_base = OTHER; note = 2'-O-methylguanosine-3'-phosphate
  modified_base 14: mod_base = OTHER; note = 2'-fluorouridine-3'-phosphate
  modified_base 15: mod_base = OTHER; note = 2'-O-methyluridine-3'-phosphate
  modified_base 16: mod_base = OTHER; note = 2'-fluoroguanosine-3'-phosphate
  modified_base 17: mod_base = OTHER; note = 2'-O-methylcytidine-3'-phosphate
  modified_base 18: mod_base = OTHER; note = 2'-O-methyladenosine-3'-phosphate
  modified_base 19: mod_base = OTHER; note = 2'-O-methyluridine-3'-phosphate
  modified_base 20: mod_base = OTHER; note = 2'-O-methyluridine-3'-phosphate
  modified_base 21: mod_base = OTHER; note = 2'-O-methylguanosine-3'-phosphorothioate
  modified_base 22: mod_base = OTHER; note = 2'-O-methyluridine-3'-phosphorothioate
  modified_base 23: mod_base = OTHER; note = 2'-O-methyluridine-3'-phosphate
tttggatagttggttgcattgtt

SEQ ID NO: 3859 - RNA, 23 nt, synthetic construct
  source 1..23: mol_type = other RNA; note = Description of Artificial Sequence: Synthetic oligonucleotide
  modified_base 1: mod_base = OTHER; note = 2'-O-methyladenosine-3'-phosphorothioate
  modified_base 2: mod_base = OTHER; note = 2'-fluorouridine -3'-phosphorothioate
  modified_base 3: mod_base = OTHER; note = 2'-O-methyluridine-3'-phosphate
  modified_base 4: mod_base = OTHER; note = 2'-O-methyladenosine-3'-phosphate
  modified_base 5: mod_base = OTHER; note = 2'-O-methyluridine-3'-phosphate
  modified_base 6: mod_base = OTHER; note = 2'-fluoroadenosine-3'-phosphate
  modified_base 7: mod_base = OTHER; note = 2'-O-methylcytidine-3'-phosphate
  modified_base 8: mod_base = OTHER; note = 2'-fluorouridine-3'-phosphate
  modified_base 9: mod_base = OTHER; note = 2'-fluorocytidine-3'-phosphate
  modified_base 10: mod_base = OTHER; note = 2'-O-methyluridine-3'-phosphate
  modified_base 11: mod_base = OTHER; note = 2'-O-methylcytidine-3'-phosphate
  modified_base 12: mod_base = OTHER; note = 2'-O-methyluridine-3'-phosphate
  modified_base 13: mod_base = OTHER; note = 2'-O-methylguanosine-3'-phosphate
  modified_base 14: mod_base = OTHER; note = 2'-fluorocytidine-3'-phosphate
  modified_base 15: mod_base = OTHER; note = 2'-O-methylcytidine-3'-phosphate
  modified_base 16: mod_base = OTHER; note = 2'-fluoroadenosine-3'-phosphate
  modified_base 17: mod_base = OTHER; note = 2'-O-methyladenosine-3'-phosphate
  modified_base 18: mod_base = OTHER; note = 2'-O-methyladenosine-3'-phosphate
  modified_base 19: mod_base = OTHER; note = 2'-O-methyluridine-3'-phosphate
  modified_base 20: mod_base = OTHER; note = 2'-O-methylcytidine-3'-phosphate
  modified_base 21: mod_base = OTHER; note = 2'-O-methyluridine-3'-phosphorothioate
  modified_base 22: mod_base = OTHER; note = 2'-O-methylguanosine-3'-phosphorothioate
  modified_base 23: mod_base = OTHER; note = 2'-O-methylcytidine-3'-phosphate
attatactctctgccaaatctgc

SEQ ID NO: 3860 - RNA, 23 nt, synthetic construct
  source 1..23: mol_type = other RNA; note = Description of Artificial Sequence: Synthetic oligonucleotide
  modified_base 1: mod_base = OTHER; note = 2'-O-methyluridine-3'-phosphorothioate
  modified_base 2: mod_base = OTHER; note = 2'-fluoroadenosine-3'-phosphorothioate
  modified_base 3: mod_base = OTHER; note = 2'-O-methylcytidine-3'-phosphate
  modified_base 4: mod_base = OTHER; note = 2'-O-methylcytidine-3'-phosphate
  modified_base 5: mod_base = OTHER; note = 2'-O-methylcytidine-3'-phosphate
  modified_base 6: mod_base = OTHER; note = 2'-fluorouridine-3'-phosphate
  modified_base 7: mod_base = OTHER; note = 2'-O-methyluridine-3'-phosphate
  modified_base 8: mod_base = OTHER; note = 2'-fluoroadenosine-3'-phosphate
  modified_base 9: mod_base = OTHER; note = 2'-fluoroadenosine-3'-phosphate
  modified_base 10: mod_base = OTHER; note = 2'-O-methyluridine-3'-phosphate
  modified_base 11: mod_base = OTHER; note = 2'-O-methylcytidine-3'-phosphate
  modified_base 12: mod_base = OTHER; note = 2'-O-methyladenosine-3'-phosphate
  modified_base 13: mod_base = OTHER; note = 2'-O-methyluridine-3'-phosphate
  modified_base 14: mod_base = OTHER; note = 2'-fluoroguanosine-3'-phosphate
  modified_base 15: mod_base = OTHER; note = 2'-O-methylguanosine-3'-phosphate
  modified_base 16: mod_base = OTHER; note = 2'-fluorouridine-3'-phosphate
  modified_base 17: mod_base = OTHER; note = 2'-O-methylguanosine-3'-phosphate
  modified_base 18: mod_base = OTHER; note = 2'-O-methylguanosine-3'-phosphate
  modified_base 19: mod_base = OTHER; note = 2'-O-methyladenosine-3'-phosphate
  modified_base 20: mod_base = OTHER; note = 2'-O-methyladenosine-3'-phosphate
  modified_base 21: mod_base = OTHER; note = 2'-O-methyladenosine-3'-phosphorothioate
  modified_base 22: mod_base = OTHER; note = 2'-O-methylcytidine-3'-phosphorothioate
  modified_base 23: mod_base = OTHER; note = 2'-O-methyluridine-3'-phosphate
tacccttaatcatggtggaaact

SEQ ID NO: 3861 - RNA, 23 nt, synthetic construct
  source 1..23: mol_type = other RNA; note = Description of Artificial Sequence: Synthetic oligonucleotide
  modified_base 1: mod_base = OTHER; note = 2'-O-methyladenosine-3'-phosphorothioate
  modified_base 2: mod_base = OTHER; note = 2'-fluoroadenosine-3'-phosphorothioate
  modified_base 3: mod_base = OTHER; note = 2'-O-methylcytidine-3'-phosphate
  modified_base 4: mod_base = OTHER; note = 2'-O-methyluridine-3'-phosphate
  modified_base 5: mod_base = OTHER; note = 2'-O-methyladenosine-3'-phosphate
  modified_base 6: mod_base = OTHER; note = 2'-fluorouridine-3'-phosphate
  modified_base 7: mod_base = OTHER; note = 2'-O-methyluridine-3'-phosphate
  modified_base 8: mod_base = OTHER; note = 2'-fluorouridine-3'-phosphate
  modified_base 9: mod_base = OTHER; note = 2'-fluorocytidine-3'-phosphate
  modified_base 10: mod_base = OTHER; note = 2'-O-methyladenosine-3'-phosphate
  modified_base 11: mod_base = OTHER; note = 2'-O-methylcytidine-3'-phosphate
  modified_base 12: mod_base = OTHER; note = 2'-O-methyladenosine-3'-phosphate
  modified_base 13: mod_base = OTHER; note = 2'-O-methylcytidine-3'-phosphate
  modified_base 14: mod_base = OTHER; note = 2'-fluorouridine-3'-phosphate
  modified_base 15: mod_base = OTHER; note = 2'-O-methyladenosine-3'-phosphate
  modified_base 16: mod_base = OTHER; note = 2'-fluoroadenosine-3'-phosphate
  modified_base 17: mod_base = OTHER; note = 2'-O-methylcytidine-3'-phosphate
  modified_base 18: mod_base = OTHER; note = 2'-O-methylcytidine-3'-phosphate
  modified_base 19: mod_base = OTHER; note = 2'-O-methyladenosine-3'-phosphate
  modified_base 20: mod_base = OTHER; note = 2'-O-methylguanosine-3'-phosphate
  modified_base 21: mod_base = OTHER; note = 2'-O-methyluridine-3'-phosphorothioate
  modified_base 22: mod_base = OTHER; note = 2'-O-methyluridine-3'-phosphorothioate
  modified_base 23: mod_base = OTHER; note = 2'-O-methylguanosine-3'-phosphate
aactatttcacactaaccagttg

SEQ ID NO: 3862 - RNA, 23 nt, synthetic construct
  source 1..23: mol_type = other RNA; note = Description of Artificial Sequence: Synthetic oligonucleotide
  modified_base 1: mod_base = OTHER; note = 2'-O-methyladenosine-3'-phosphorothioate
  modified_base 2: mod_base = OTHER; note = 2'-fluoroguanosine-3'-phosphorothioate
  modified_base 3: mod_base = OTHER; note = 2'-O-methyladenosine-3'-phosphate
  modified_base 4: mod_base = OTHER; note = 2'-O-methylguanosine-3'-phosphate
  modified_base 5: mod_base = OTHER; note = 2'-O-methyluridine-3'-phosphate
  modified_base 6: mod_base = OTHER; note = 2'-fluorouridine-3'-phosphate
  modified_base 7: mod_base = OTHER; note = 2'-O-methylguanosine-3'-phosphate
  modified_base 8: mod_base = OTHER; note = 2'-fluorocytidine-3'-phosphate
  modified_base 9: mod_base = OTHER; note = 2'-fluorocytidine-3'-phosphate
  modified_base 10: mod_base = OTHER; note = 2'-O-methyladenosine-3'-phosphate
  modified_base 11: mod_base = OTHER; note = 2'-O-methyluridine-3'-phosphate
  modified_base 12: mod_base = OTHER; note = 2'-O-methyladenosine-3'-phosphate
  modified_base 13: mod_base = OTHER; note = 2'-O-methyluridine-3'-phosphate
  modified_base 14: mod_base = OTHER; note = 2'-fluorouridine-3'-phosphate
  modified_base 15: mod_base = OTHER; note = 2'-O-methylguanosine-3'-phosphate
  modified_base 16: mod_base = OTHER; note = 2'-fluoroguanosine-3'-phosphate
  modified_base 17: mod_base = OTHER; note = 2'-O-methyladenosine-3'-phosphate
  modified_base 18: mod_base = OTHER; note = 2'-O-methylcytidine-3'-phosphate
  modified_base 19: mod_base = OTHER; note = 2'-O-methyluridine-3'-phosphate
  modified_base 20: mod_base = OTHER; note = 2'-O-methyluridine-3'-phosphate
  modified_base 21: mod_base = OTHER; note = 2'-O-methylguanosine-3'-phosphorothioate
  modified_base 22: mod_base = OTHER; note = 2'-O-methylguanosine-3'-phosphorothioate
  modified_base 23: mod_base = OTHER; note = 2'-O-methyladenosine-3'-phosphate
agagttgccatattggacttgga

SEQ ID NO: 3863 - RNA, 23 nt, synthetic construct
  source 1..23: mol_type = other RNA; note = Description of Artificial Sequence: Synthetic oligonucleotide
  modified_base 1: mod_base = OTHER; note = 2'-O-methyladenosine-3'-phosphorothioate
  modified_base 2: mod_base = OTHER; note = 2'-fluoroadenosine-3'-phosphorothioate
  modified_base 3: mod_base = OTHER; note = 2'-O-methylguanosine-3'-phosphate
  modified_base 4: mod_base = OTHER; note = 2'-O-methyladenosine-3'-phosphate
  modified_base 5: mod_base = OTHER; note = 2'-O-methylcytidine-3'-phosphate
  modified_base 6: mod_base = OTHER; note = 2'-fluorocytidine-3'-phosphate
  modified_base 7: mod_base = OTHER; note = 2'-O-methylcytidine-3'-phosphate
  modified_base 8: mod_base = OTHER; note = 2'-fluorouridine-3'-phosphate
  modified_base 9: mod_base = OTHER; note = 2'-fluorouridine-3'-phosphate
  modified_base 10: mod_base = OTHER; note = 2'-O-methyladenosine-3'-phosphate
  modified_base 11: mod_base = OTHER; note = 2'-O-methyladenosine-3'-phosphate
  modified_base 12: mod_base = OTHER; note = 2'-O-methyluridine-3'-phosphate
  modified_base 13: mod_base = OTHER; note = 2'-O-methylcytidine-3'-phosphate
  modified_base 14: mod_base = OTHER; note = 2'-fluoroadenosine-3'-phosphate
  modified_base 15: mod_base = OTHER; note = 2'-O-methyluridine-3'-phosphate
  modified_base 16: mod_base = OTHER; note = 2'-fluoroguanosine-3'-phosphate
  modified_base 17: mod_base = OTHER; note = 2'-O-methylguanosine-3'-phosphate
  modified_base 18: mod_base = OTHER; note = 2'-O-methyluridine-3'-phosphate
  modified_base 19: mod_base = OTHER; note = 2'-O-methylguanosine-3'-phosphate
  modified_base 20: mod_base = OTHER; note = 2'-O-methylguanosine-3'-phosphate
  modified_base 21: mod_base = OTHER; note = 2'-O-methyladenosine-3'-phosphorothioate
  modified_base 22: mod_base = OTHER; note = 2'-O-methyladenosine-3'-phosphorothioate
  modified_base 23: mod_base = OTHER; note = 2'-O-methyladenosine-3'-phosphate
aagacccttaatcatggtggaaa

SEQ ID NO: 3864 - RNA, 23 nt, synthetic construct
  source 1..23: mol_type = other RNA; note = Description of Artificial Sequence: Synthetic oligonucleotide
  modified_base 1: mod_base = OTHER; note = 2'-O-methyluridine-3'-phosphorothioate
  modified_base 2: mod_base = OTHER; note = 2'-fluorouridine -3'-phosphorothioate
  modified_base 3: mod_base = OTHER; note = 2'-O-methyladenosine-3'-phosphate
  modified_base 4: mod_base = OTHER; note = 2'-O-methylguanosine-3'-phosphate
  modified_base 5: mod_base = OTHER; note = 2'-O-methylcytidine-3'-phosphate
  modified_base 6: mod_base = OTHER; note = 2'-fluorocytidine-3'-phosphate
  modified_base 7: mod_base = OTHER; note = 2'-O-methyluridine-3'-phosphate
  modified_base 8: mod_base = OTHER; note = 2'-fluoroadenosine-3'-phosphate
  modified_base 9: mod_base = OTHER; note = 2'-fluoroguanosine-3'-phosphate
  modified_base 10: mod_base = OTHER; note = 2'-O-methyladenosine-3'-phosphate
  modified_base 11: mod_base = OTHER; note = 2'-O-methylcytidine-3'-phosphate
  modified_base 12: mod_base = OTHER; note = 2'-O-methyladenosine-3'-phosphate
  modified_base 13: mod_base = OTHER; note = 2'-O-methylguanosine-3'-phosphate
  modified_base 14: mod_base = OTHER; note = 2'-fluorouridine-3'-phosphate
  modified_base 15: mod_base = OTHER; note = 2'-O-methylguanosine-3'-phosphate
  modified_base 16: mod_base = OTHER; note = 2'-fluoroadenosine-3'-phosphate
  modified_base 17: mod_base = OTHER; note = 2'-O-methyladenosine-3'-phosphate
  modified_base 18: mod_base = OTHER; note = 2'-O-methyladenosine-3'-phosphate
  modified_base 19: mod_base = OTHER; note = 2'-O-methyluridine-3'-phosphate
  modified_base 20: mod_base = OTHER; note = 2'-O-methylguanosine-3'-phosphate
  modified_base 21: mod_base = OTHER; note = 2'-O-methyladenosine-3'-phosphorothioate
  modified_base 22: mod_base = OTHER; note = 2'-O-methyluridine-3'-phosphorothioate
  modified_base 23: mod_base = OTHER; note = 2'-O-methyladenosine-3'-phosphate
ttagcctagacagtgaaatgata

SEQ ID NO: 3865 - RNA, 23 nt, synthetic construct
  source 1..23: mol_type = other RNA; note = Description of Artificial Sequence: Synthetic oligonucleotide
  modified_base 1: mod_base = OTHER; note = 2'-O-methyladenosine-3'-phosphorothioate
  modified_base 2: mod_base = OTHER; note = 2'-fluorocytidine-3'-phosphorothioate
  modified_base 3: mod_base = OTHER; note = 2'-O-methyladenosine-3'-phosphate
  modified_base 4: mod_base = OTHER; note = 2'-O-methylguanosine-3'-phosphate
  modified_base 5: mod_base = OTHER; note = 2'-O-methyladenosine-3'-phosphate
  modified_base 6: mod_base = OTHER; note = 2'-fluorouridine-3'-phosphate
  modified_base 7: mod_base = OTHER; note = 2'-O-methylcytidine-3'-phosphate
  modified_base 8: mod_base = OTHER; note = 2'-fluoroadenosine-3'-phosphate
  modified_base 9: mod_base = OTHER; note = 2'-fluoroguanosine-3'-phosphate
  modified_base 10: mod_base = OTHER; note = 2'-O-methyladenosine-3'-phosphate
  modified_base 11: mod_base = OTHER; note = 2'-O-methyluridine-3'-phosphate
  modified_base 12: mod_base = OTHER; note = 2'-O-methyladenosine-3'-phosphate
  modified_base 13: mod_base = OTHER; note = 2'-O-methyladenosine-3'-phosphate
  modified_base 14: mod_base = OTHER; note = 2'-fluoroadenosine-3'-phosphate
  modified_base 15: mod_base = OTHER; note = 2'-O-methyladenosine-3'-phosphate
  modified_base 16: mod_base = OTHER; note = 2'-fluoroadenosine-3'-phosphate
  modified_base 17: mod_base = OTHER; note = 2'-O-methylguanosine-3'-phosphate
  modified_base 18: mod_base = OTHER; note = 2'-O-methylguanosine-3'-phosphate
  modified_base 19: mod_base = OTHER; note = 2'-O-methyladenosine-3'-phosphate
  modified_base 20: mod_base = OTHER; note = 2'-O-methylcytidine-3'-phosphate
  modified_base 21: mod_base = OTHER; note = 2'-O-methyladenosine-3'-phosphorothioate
  modified_base 22: mod_base = OTHER; note = 2'-O-methyladenosine-3'-phosphorothioate
  modified_base 23: mod_base = OTHER; note = 2'-O-methylcytidine-3'-phosphate
acagatcagataaaaaggacaac

SEQ ID NO: 3866 - RNA, 23 nt, synthetic construct
  source 1..23: mol_type = other RNA; note = Description of Artificial Sequence: Synthetic oligonucleotide
  modified_base 1: mod_base = OTHER; note = 2'-O-methyluridine-3'-phosphorothioate
  modified_base 2: mod_base = OTHER; note = 2'-fluoroadenosine-3'-phosphorothioate
  modified_base 3: mod_base = OTHER; note = 2'-O-methyluridine-3'-phosphate
  modified_base 4: mod_base = OTHER; note = 2'-O-methyladenosine-3'-phosphate
  modified_base 5: mod_base = OTHER; note = 2'-O-methyluridine-3'-phosphate
  modified_base 6: mod_base = OTHER; note = 2'-fluorouridine-3'-phosphate
  modified_base 7: mod_base = OTHER; note = 2'-O-methylguanosine-3'-phosphate
  modified_base 8: mod_base = OTHER; note = 2'-fluoroguanosine-3'-phosphate
  modified_base 9: mod_base = OTHER; note = 2'-fluoroadenosine-3'-phosphate
  modified_base 10: mod_base = OTHER; note = 2'-O-methyluridine-3'-phosphate
  modified_base 11: mod_base = OTHER; note = 2'-O-methyluridine-3'-phosphate
  modified_base 12: mod_base = OTHER; note = 2'-O-methyluridine-3'-phosphate
  modified_base 13: mod_base = OTHER; note = 2'-O-methyladenosine-3'-phosphate
  modified_base 14: mod_base = OTHER; note = 2'-fluorouridine-3'-phosphate
  modified_base 15: mod_base = OTHER; note = 2'-O-methyladenosine-3'-phosphate
  modified_base 16: mod_base = OTHER; note = 2'-fluorocytidine-3'-phosphate
  modified_base 17: mod_base = OTHER; note = 2'-O-methyladenosine-3'-phosphate
  modified_base 18: mod_base = OTHER; note = 2'-O-methylcytidine-3'-phosphate
  modified_base 19: mod_base = OTHER; note = 2'-O-methyluridine-3'-phosphate
  modified_base 20: mod_base = OTHER; note = 2'-O-methylguanosine-3'-phosphate
  modified_base 21: mod_base = OTHER; note = 2'-O-methylguanosine-3'-phosphorothioate
  modified_base 22: mod_base = OTHER; note = 2'-O-methyladenosine-3'-phosphorothioate
  modified_base 23: mod_base = OTHER; note = 2'-O-methyluridine-3'-phosphate
tatattggatttatacactggat

SEQ ID NO: 3867 - RNA, 23 nt, synthetic construct
  source 1..23: mol_type = other RNA; note = Description of Artificial Sequence: Synthetic oligonucleotide
  modified_base 1: mod_base = OTHER; note = 2'-O-methyluridine-3'-phosphorothioate
  modified_base 2: mod_base = OTHER; note = 2'-fluorouridine -3'-phosphorothioate
  modified_base 3: mod_base = OTHER; note = 2'-O-methyladenosine-3'-phosphate
  modified_base 4: mod_base = OTHER; note = 2'-O-methylguanosine-3'-phosphate
  modified_base 5: mod_base = OTHER; note = 2'-O-methyluridine-3'-phosphate
  modified_base 6: mod_base = OTHER; note = 2'-fluorouridine-3'-phosphate
  modified_base 7: mod_base = OTHER; note = 2'-O-methylguanosine-3'-phosphate
  modified_base 8: mod_base = OTHER; note = 2'-fluoroguanosine-3'-phosphate
  modified_base 9: mod_base = OTHER; note = 2'-fluorouridine-3'-phosphate
  modified_base 10: mod_base = OTHER; note = 2'-O-methyladenosine-3'-phosphate
  modified_base 11: mod_base = OTHER; note = 2'-O-methyluridine-3'-phosphate
  modified_base 12: mod_base = OTHER; note = 2'-O-methyladenosine-3'-phosphate
  modified_base 13: mod_base = OTHER; note = 2'-O-methyladenosine-3'-phosphate
  modified_base 14: mod_base = OTHER; note = 2'-fluorocytidine-3'-phosphate
  modified_base 15: mod_base = OTHER; note = 2'-O-methyladenosine-3'-phosphate
  modified_base 16: mod_base = OTHER; note = 2'-fluorocytidine-3'-phosphate
  modified_base 17: mod_base = OTHER; note = 2'-O-methyluridine-3'-phosphate
  modified_base 18: mod_base = OTHER; note = 2'-O-methyluridine-3'-phosphate
  modified_base 19: mod_base = OTHER; note = 2'-O-methylguanosine-3'-phosphate
  modified_base 20: mod_base = OTHER; note = 2'-O-methylguanosine-3'-phosphate
  modified_base 21: mod_base = OTHER; note = 2'-O-methyladenosine-3'-phosphorothioate
  modified_base 22: mod_base = OTHER; note = 2'-O-methyluridine-3'-phosphorothioate
  modified_base 23: mod_base = OTHER; note = 2'-O-methyladenosine-3'-phosphate
ttagttggtataacacttggata

SEQ ID NO: 3868 - RNA, 23 nt, synthetic construct
  source 1..23: mol_type = other RNA; note = Description of Artificial Sequence: Synthetic oligonucleotide
  modified_base 1: mod_base = OTHER; note = 2'-O-methyluridine-3'-phosphorothioate
  modified_base 2: mod_base = OTHER; note = 2'-fluoroadenosine-3'-phosphorothioate
  modified_base 3: mod_base = OTHER; note = 2'-O-methylguanosine-3'-phosphate
  modified_base 4: mod_base = OTHER; note = 2'-O-methyladenosine-3'-phosphate
  modified_base 5: mod_base = OTHER; note = 2'-O-methylguanosine-3'-phosphate
  modified_base 6: mod_base = OTHER; note = 2'-fluoroadenosine-3'-phosphate
  modified_base 7: mod_base = OTHER; note = 2'-O-methylcytidine-3'-phosphate
  modified_base 8: mod_base = OTHER; note = 2'-fluoroadenosine-3'-phosphate
  modified_base 9: mod_base = OTHER; note = 2'-fluoroadenosine-3'-phosphate
  modified_base 10: mod_base = OTHER; note = 2'-O-methyluridine-3'-phosphate
  modified_base 11: mod_base = OTHER; note = 2'-O-methylcytidine-3'-phosphate
  modified_base 12: mod_base = OTHER; note = 2'-O-methyluridine-3'-phosphate
  modified_base 13: mod_base = OTHER; note = 2'-O-methyluridine-3'-phosphate
  modified_base 14: mod_base = OTHER; note = 2'-fluorouridine-3'-phosphate
  modified_base 15: mod_base = OTHER; note = 2'-O-methylguanosine-3'-phosphate
  modified_base 16: mod_base = OTHER; note = 2'-fluoroguanosine-3'-phosphate
  modified_base 17: mod_base = OTHER; note = 2'-O-methyluridine-3'-phosphate
  modified_base 18: mod_base = OTHER; note = 2'-O-methylguanosine-3'-phosphate
  modified_base 19: mod_base = OTHER; note = 2'-O-methyluridine-3'-phosphate
  modified_base 20: mod_base = OTHER; note = 2'-O-methyluridine-3'-phosphate
  modified_base 21: mod_base = OTHER; note = 2'-O-methylcytidine-3'-phosphorothioate
  modified_base 22: mod_base = OTHER; note = 2'-O-methyluridine-3'-phosphorothioate
  modified_base 23: mod_base = OTHER; note = 2'-O-methyladenosine-3'-phosphate
tagagacaatctttggtgttcta

SEQ ID NO: 3869 - RNA, 23 nt, synthetic construct
  source 1..23: mol_type = other RNA; note = Description of Artificial Sequence: Synthetic oligonucleotide
  modified_base 1: mod_base = OTHER; note = 2'-O-methyluridine-3'-phosphorothioate
  modified_base 2: mod_base = OTHER; note = 2'-fluorocytidine-3'-phosphorothioate
  modified_base 3: mod_base = OTHER; note = 2'-O-methyladenosine-3'-phosphate
  modified_base 4: mod_base = OTHER; note = 2'-O-methylguanosine-3'-phosphate
  modified_base 5: mod_base = OTHER; note = 2'-O-methyladenosine-3'-phosphate
  modified_base 6: mod_base = OTHER; note = 2'-fluoroguanosine-3'-phosphate
  modified_base 7: mod_base = OTHER; note = 2'-O-methyladenosine-3'-phosphate
  modified_base 8: mod_base = OTHER; note = 2'-fluorocytidine-3'-phosphate
  modified_base 9: mod_base = OTHER; note = 2'-fluoroadenosine-3'-phosphate
  modified_base 10: mod_base = OTHER; note = 2'-O-methyladenosine-3'-phosphate
  modified_base 11: mod_base = OTHER; note = 2'-O-methyluridine-3'-phosphate
  modified_base 12: mod_base = OTHER; note = 2'-O-methylcytidine-3'-phosphate
  modified_base 13: mod_base = OTHER; note = 2'-O-methyluridine-3'-phosphate
  modified_base 14: mod_base = OTHER; note = 2'-fluorouridine-3'-phosphate
  modified_base 15: mod_base = OTHER; note = 2'-O-methyluridine-3'-phosphate
  modified_base 16: mod_base = OTHER; note = 2'-fluoroguanosine-3'-phosphate
  modified_base 17: mod_base = OTHER; note = 2'-O-methylguanosine-3'-phosphate
  modified_base 18: mod_base = OTHER; note = 2'-O-methyluridine-3'-phosphate
  modified_base 19: mod_base = OTHER; note = 2'-O-methylguanosine-3'-phosphate
  modified_base 20: mod_base = OTHER; note = 2'-O-methyluridine-3'-phosphate
  modified_base 21: mod_base = OTHER; note = 2'-O-methyluridine-3'-phosphorothioate
  modified_base 22: mod_base = OTHER; note = 2'-O-methylcytidine-3'-phosphorothioate
  modified_base 23: mod_base = OTHER; note = 2'-O-methyluridine-3'-phosphate
tcagagacaatctttggtgttct

SEQ ID NO: 3870 - RNA, 23 nt, synthetic construct
  source 1..23: mol_type = other RNA; note = Description of Artificial Sequence: Synthetic oligonucleotide
  modified_base 1: mod_base = OTHER; note = 2'-O-methyladenosine-3'-phosphorothioate
  modified_base 2: mod_base = OTHER; note = 2'-fluorouridine -3'-phosphorothioate
  modified_base 3: mod_base = OTHER; note = 2'-O-methylcytidine-3'-phosphate
  modified_base 4: mod_base = OTHER; note = 2'-O-methyladenosine-3'-phosphate
  modified_base 5: mod_base = OTHER; note = 2'-O-methylguanosine-3'-phosphate
  modified_base 6: mod_base = OTHER; note = 2'-fluoroadenosine-3'-phosphate
  modified_base 7: mod_base = OTHER; note = 2'-O-methyluridine-3'-phosphate
  modified_base 8: mod_base = OTHER; note = 2'-fluoroadenosine-3'-phosphate
  modified_base 9: mod_base = OTHER; note = 2'-fluoroadenosine-3'-phosphate
  modified_base 10: mod_base = OTHER; note = 2'-O-methyladenosine-3'-phosphate
  modified_base 11: mod_base = OTHER; note = 2'-O-methyladenosine-3'-phosphate
  modified_base 12: mod_base = OTHER; note = 2'-O-methyladenosine-3'-phosphate
  modified_base 13: mod_base = OTHER; note = 2'-O-methylguanosine-3'-phosphate
  modified_base 14: mod_base = OTHER; note = 2'-fluoroguanosine-3'-phosphate
  modified_base 15: mod_base = OTHER; note = 2'-O-methyladenosine-3'-phosphate
  modified_base 16: mod_base = OTHER; note = 2'-fluorocytidine-3'-phosphate
  modified_base 17: mod_base = OTHER; note = 2'-O-methyladenosine-3'-phosphate
  modified_base 18: mod_base = OTHER; note = 2'-O-methyladenosine-3'-phosphate
  modified_base 19: mod_base = OTHER; note = 2'-O-methylcytidine-3'-phosphate
  modified_base 20: mod_base = OTHER; note = 2'-O-methyladenosine-3'-phosphate
  modified_base 21: mod_base = OTHER; note = 2'-O-methyluridine-3'-phosphorothioate
  modified_base 22: mod_base = OTHER; note = 2'-O-methylguanosine-3'-phosphorothioate
  modified_base 23: mod_base = OTHER; note = 2'-O-methylcytidine-3'-phosphate
atcagataaaaaggacaacatgc

SEQ ID NO: 3871 - RNA, 23 nt, synthetic construct
  source 1..23: mol_type = other RNA; note = Description of Artificial Sequence: Synthetic oligonucleotide
  modified_base 1: mod_base = OTHER; note = 2'-O-methyladenosine-3'-phosphorothioate
  modified_base 2: mod_base = OTHER; note = 2'-fluorouridine -3'-phosphorothioate
  modified_base 3: mod_base = OTHER; note = 2'-O-methyluridine-3'-phosphate
  modified_base 4: mod_base = OTHER; note = 2'-O-methyluridine-3'-phosphate
  modified_base 5: mod_base = OTHER; note = 2'-O-methylcytidine-3'-phosphate
  modified_base 6: mod_base = OTHER; note = 2'-fluorouridine-3'-phosphate
  modified_base 7: mod_base = OTHER; note = 2'-O-methyladenosine-3'-phosphate
  modified_base 8: mod_base = OTHER; note = 2'-fluoroadenosine-3'-phosphate
  modified_base 9: mod_base = OTHER; note = 2'-fluorocytidine-3'-phosphate
  modified_base 10: mod_base = OTHER; note = 2'-O-methyluridine-3'-phosphate
  modified_base 11: mod_base = OTHER; note = 2'-O-methyluridine-3'-phosphate
  modified_base 12: mod_base = OTHER; note = 2'-O-methylcytidine-3'-phosphate
  modified_base 13: mod_base = OTHER; note = 2'-O-methyladenosine-3'-phosphate
  modified_base 14: mod_base = OTHER; note = 2'-fluoroguanosine-3'-phosphate
  modified_base 15: mod_base = OTHER; note = 2'-O-methylguanosine-3'-phosphate
  modified_base 16: mod_base = OTHER; note = 2'-fluoroadenosine-3'-phosphate
  modified_base 17: mod_base = OTHER; note = 2'-O-methylguanosine-3'-phosphate
  modified_base 18: mod_base = OTHER; note = 2'-O-methyluridine-3'-phosphate
  modified_base 19: mod_base = OTHER; note = 2'-O-methyluridine-3'-phosphate
  modified_base 20: mod_base = OTHER; note = 2'-O-methylguanosine-3'-phosphate
  modified_base 21: mod_base = OTHER; note = 2'-O-methyladenosine-3'-phosphorothioate
  modified_base 22: mod_base = OTHER; note = 2'-O-methyluridine-3'-phosphorothioate
  modified_base 23: mod_base = OTHER; note = 2'-O-methylguanosine-3'-phosphate
atttctaacttcaggagttgatg

SEQ ID NO: 3872 - RNA, 23 nt, synthetic construct
  source 1..23: mol_type = other RNA; note = Description of Artificial Sequence: Synthetic oligonucleotide
  modified_base 1: mod_base = OTHER; note = 2'-O-methyluridine-3'-phosphorothioate
  modified_base 2: mod_base = OTHER; note = 2'-fluoroguanosine-3'-phosphorothioate
  modified_base 3: mod_base = OTHER; note = 2'-O-methylguanosine-3'-phosphate
  modified_base 4: mod_base = OTHER; note = 2'-O-methyluridine-3'-phosphate
  modified_base 5: mod_base = OTHER; note = 2'-O-methyladenosine-3'-phosphate
  modified_base 6: mod_base = OTHER; note = 2'-fluorouridine-3'-phosphate
  modified_base 7: mod_base = OTHER; note = 2'-O-methyladenosine-3'-phosphate
  modified_base 8: mod_base = OTHER; note = 2'-fluoroadenosine-3'-phosphate
  modified_base 9: mod_base = OTHER; note = 2'-fluorocytidine-3'-phosphate
  modified_base 10: mod_base = OTHER; note = 2'-O-methyladenosine-3'-phosphate
  modified_base 11: mod_base = OTHER; note = 2'-O-methylcytidine-3'-phosphate
  modified_base 12: mod_base = OTHER; note = 2'-O-methyluridine-3'-phosphate
  modified_base 13: mod_base = OTHER; note = 2'-O-methyluridine-3'-phosphate
  modified_base 14: mod_base = OTHER; note = 2'-fluoroguanosine-3'-phosphate
  modified_base 15: mod_base = OTHER; note = 2'-O-methylguanosine-3'-phosphate
  modified_base 16: mod_base = OTHER; note = 2'-fluoroadenosine-3'-phosphate
  modified_base 17: mod_base = OTHER; note = 2'-O-methyluridine-3'-phosphate
  modified_base 18: mod_base = OTHER; note = 2'-O-methyladenosine-3'-phosphate
  modified_base 19: mod_base = OTHER; note = 2'-O-methylguanosine-3'-phosphate
  modified_base 20: mod_base = OTHER; note = 2'-O-methyluridine-3'-phosphate
  modified_base 21: mod_base = OTHER; note = 2'-O-methyluridine-3'-phosphorothioate
  modified_base 22: mod_base = OTHER; note = 2'-O-methylguanosine-3'-phosphorothioate
  modified_base 23: mod_base = OTHER; note = 2'-O-methylguanosine-3'-phosphate
tggtataacacttggatagttgg

SEQ ID NO: 3873 - RNA, 23 nt, synthetic construct
  source 1..23: mol_type = other RNA; note = Description of Artificial Sequence: Synthetic oligonucleotide
  modified_base 1: mod_base = OTHER; note = 2'-O-methyladenosine-3'-phosphorothioate
  modified_base 2: mod_base = OTHER; note = 2'-fluoroguanosine-3'-phosphorothioate
  modified_base 3: mod_base = OTHER; note = 2'-O-methyladenosine-3'-phosphate
  modified_base 4: mod_base = OTHER; note = 2'-O-methylcytidine-3'-phosphate
  modified_base 5: mod_base = OTHER; note = 2'-O-methyluridine-3'-phosphate
  modified_base 6: mod_base = OTHER; note = 2'-fluoroadenosine-3'-phosphate
  modified_base 7: mod_base = OTHER; note = 2'-O-methylcytidine-3'-phosphate
  modified_base 8: mod_base = OTHER; note = 2'-fluoroadenosine-3'-phosphate
  modified_base 9: mod_base = OTHER; note = 2'-fluorocytidine-3'-phosphate
  modified_base 10: mod_base = OTHER; note = 2'-O-methyladenosine-3'-phosphate
  modified_base 11: mod_base = OTHER; note = 2'-O-methyladenosine-3'-phosphate
  modified_base 12: mod_base = OTHER; note = 2'-O-methylguanosine-3'-phosphate
  modified_base 13: mod_base = OTHER; note = 2'-O-methyladenosine-3'-phosphate
  modified_base 14: mod_base = OTHER; note = 2'-fluorouridine-3'-phosphate
  modified_base 15: mod_base = OTHER; note = 2'-O-methyluridine-3'-phosphate
  modified_base 16: mod_base = OTHER; note = 2'-fluoroadenosine-3'-phosphate
  modified_base 17: mod_base = OTHER; note = 2'-O-methyladenosine-3'-phosphate
  modified_base 18: mod_base = OTHER; note = 2'-O-methyluridine-3'-phosphate
  modified_base 19: mod_base = OTHER; note = 2'-O-methyladenosine-3'-phosphate
  modified_base 20: mod_base = OTHER; note = 2'-O-methylcytidine-3'-phosphate
  modified_base 21: mod_base = OTHER; note = 2'-O-methylcytidine-3'-phosphorothioate
  modified_base 22: mod_base = OTHER; note = 2'-O-methyladenosine-3'-phosphorothioate
  modified_base 23: mod_base = OTHER; note = 2'-O-methyluridine-3'-phosphate
agactacacaagattaataccat

SEQ ID NO: 3874 - RNA, 23 nt, synthetic construct
  source 1..23: mol_type = other RNA; note = Description of Artificial Sequence: Synthetic oligonucleotide
  modified_base 1: mod_base = OTHER; note = 2'-O-methyluridine-3'-phosphorothioate
  modified_base 2: mod_base = OTHER; note = 2'-fluoroguanosine-3'-phosphorothioate
  modified_base 3: mod_base = OTHER; note = 2'-O-methylcytidine-3'-phosphate
  modified_base 4: mod_base = OTHER; note = 2'-O-methyladenosine-3'-phosphate
  modified_base 5: mod_base = OTHER; note = 2'-O-methyluridine-3'-phosphate
  modified_base 6: mod_base = OTHER; note = 2'-fluoroguanosine-3'-phosphate
  modified_base 7: mod_base = OTHER; note = 2'-O-methyluridine-3'-phosphate
  modified_base 8: mod_base = OTHER; note = 2'-fluorouridine-3'-phosphate
  modified_base 9: mod_base = OTHER; note = 2'-fluorocytidine-3'-phosphate
  modified_base 10: mod_base = OTHER; note = 2'-O-methyladenosine-3'-phosphate
  modified_base 11: mod_base = OTHER; note = 2'-O-methylguanosine-3'-phosphate
  modified_base 12: mod_base = OTHER; note = 2'-O-methyluridine-3'-phosphate
  modified_base 13: mod_base = OTHER; note = 2'-O-methylguanosine-3'-phosphate
  modified_base 14: mod_base = OTHER; note = 2'-fluoroadenosine-3'-phosphate
  modified_base 15: mod_base = OTHER; note = 2'-O-methyladenosine-3'-phosphate
  modified_base 16: mod_base = OTHER; note = 2'-fluoroguanosine-3'-phosphate
  modified_base 17: mod_base = OTHER; note = 2'-O-methylguanosine-3'-phosphate
  modified_base 18: mod_base = OTHER; note = 2'-O-methyladenosine-3'-phosphate
  modified_base 19: mod_base = OTHER; note = 2'-O-methylguanosine-3'-phosphate
  modified_base 20: mod_base = OTHER; note = 2'-O-methylcytidine-3'-phosphate
  modified_base 21: mod_base = OTHER; note = 2'-O-methylcytidine-3'-phosphorothioate
  modified_base 22: mod_base = OTHER; note = 2'-O-methyladenosine-3'-phosphorothioate
  modified_base 23: mod_base = OTHER; note = 2'-O-methylguanosine-3'-phosphate
tgcatgttcagtgaaggagccag

SEQ ID NO: 3875 - RNA, 23 nt, synthetic construct
  source 1..23: mol_type = other RNA; note = Description of Artificial Sequence: Synthetic oligonucleotide
  modified_base 1: mod_base = OTHER; note = 2'-O-methyluridine-3'-phosphorothioate
  modified_base 2: mod_base = OTHER; note = 2'-fluoroguanosine-3'-phosphorothioate
  modified_base 3: mod_base = OTHER; note = 2'-O-methylguanosine-3'-phosphate
  modified_base 4: mod_base = OTHER; note = 2'-O-methyluridine-3'-phosphate
  modified_base 5: mod_base = OTHER; note = 2'-O-methyladenosine-3'-phosphate
  modified_base 6: mod_base = OTHER; note = 2'-fluoroadenosine-3'-phosphate
  modified_base 7: mod_base = OTHER; note = 2'-O-methyluridine-3'-phosphate
  modified_base 8: mod_base = OTHER; note = 2'-fluoroguanosine-3'-phosphate
  modified_base 9: mod_base = OTHER; note = 2'-fluorouridine-3'-phosphate
  modified_base 10: mod_base = OTHER; note = 2'-O-methyladenosine-3'-phosphate
  modified_base 11: mod_base = OTHER; note = 2'-O-methylcytidine-3'-phosphate
  modified_base 12: mod_base = OTHER; note = 2'-O-methyladenosine-3'-phosphate
  modified_base 13: mod_base = OTHER; note = 2'-O-methylcytidine-3'-phosphate
  modified_base 14: mod_base = OTHER; note = 2'-fluorouridine-3'-phosphate
  modified_base 15: mod_base = OTHER; note = 2'-O-methyladenosine-3'-phosphate
  modified_base 16: mod_base = OTHER; note = 2'-fluorocytidine-3'-phosphate
  modified_base 17: mod_base = OTHER; note = 2'-O-methyluridine-3'-phosphate
  modified_base 18: mod_base = OTHER; note = 2'-O-methylguanosine-3'-phosphate
  modified_base 19: mod_base = OTHER; note = 2'-O-methyladenosine-3'-phosphate
  modified_base 20: mod_base = OTHER; note = 2'-O-methyluridine-3'-phosphate
  modified_base 21: mod_base = OTHER; note = 2'-O-methyladenosine-3'-phosphorothioate
  modified_base 22: mod_base = OTHER; note = 2'-O-methyluridine-3'-phosphorothioate
  modified_base 23: mod_base = OTHER; note = 2'-O-methyladenosine-3'-phosphate
tggtaatgtacactactgatata

SEQ ID NO: 3876 - RNA, 23 nt, synthetic construct
  source 1..23: mol_type = other RNA; note = Description of Artificial Sequence: Synthetic oligonucleotide
  modified_base 1: mod_base = OTHER; note = 2'-O-methyluridine-3'-phosphorothioate
  modified_base 2: mod_base = OTHER; note = 2'-fluoroguanosine-3'-phosphorothioate
  modified_base 3: mod_base = OTHER; note = 2'-O-methyluridine-3'-phosphate
  modified_base 4: mod_base = OTHER; note = 2'-O-methylguanosine-3'-phosphate
  modified_base 5: mod_base = OTHER; note = 2'-O-methyluridine-3'-phosphate
  modified_base 6: mod_base = OTHER; note = 2'-fluorouridine-3'-phosphate
  modified_base 7: mod_base = OTHER; note = 2'-O-methylcytidine-3'-phosphate
  modified_base 8: mod_base = OTHER; note = 2'-fluorouridine-3'-phosphate
  modified_base 9: mod_base = OTHER; note = 2'-fluoroadenosine-3'-phosphate
  modified_base 10: mod_base = OTHER; note = 2'-O-methyladenosine-3'-phosphate
  modified_base 11: mod_base = OTHER; note = 2'-O-methylguanosine-3'-phosphate
  modified_base 12: mod_base = OTHER; note = 2'-O-methylguanosine-3'-phosphate
  modified_base 13: mod_base = OTHER; note = 2'-O-methyladenosine-3'-phosphate
  modified_base 14: mod_base = OTHER; note = 2'-fluoroadenosine-3'-phosphate
  modified_base 15: mod_base = OTHER; note = 2'-O-methyladenosine-3'-phosphate
  modified_base 16: mod_base = OTHER; note = 2'-fluoroadenosine-3'-phosphate
  modified_base 17: mod_base = OTHER; note = 2'-O-methylguanosine-3'-phosphate
  modified_base 18: mod_base = OTHER; note = 2'-O-methylguanosine-3'-phosphate
  modified_base 19: mod_base = OTHER; note = 2'-O-methylcytidine-3'-phosphate
  modified_base 20: mod_base = OTHER; note = 2'-O-methyluridine-3'-phosphate
  modified_base 21: mod_base = OTHER; note = 2'-O-methylguanosine-3'-phosphorothioate
  modified_base 22: mod_base = OTHER; note = 2'-O-methylcytidine-3'-phosphorothioate
  modified_base 23: mod_base = OTHER; note = 2'-O-methylcytidine-3'-phosphate
tgtgttctaaggaaaaggctgcc

SEQ ID NO: 3877 - RNA, 23 nt, synthetic construct
  source 1..23: mol_type = other RNA; note = Description of Artificial Sequence: Synthetic oligonucleotide
  modified_base 1: mod_base = OTHER; note = 2'-O-methyluridine-3'-phosphorothioate
  modified_base 2: mod_base = OTHER; note = 2'-fluoroadenosine-3'-phosphorothioate
  modified_base 3: mod_base = OTHER; note = 2'-O-methyladenosine-3'-phosphate
  modified_base 4: mod_base = OTHER; note = 2'-O-methylcytidine-3'-phosphate
  modified_base 5: mod_base = OTHER; note = 2'-O-methyluridine-3'-phosphate
  modified_base 6: mod_base = OTHER; note = 2'-fluoroadenosine-3'-phosphate
  modified_base 7: mod_base = OTHER; note = 2'-O-methyluridine-3'-phosphate
  modified_base 8: mod_base = OTHER; note = 2'-fluorouridine-3'-phosphate
  modified_base 9: mod_base = OTHER; note = 2'-fluorouridine-3'-phosphate
  modified_base 10: mod_base = OTHER; note = 2'-O-methylcytidine-3'-phosphate
  modified_base 11: mod_base = OTHER; note = 2'-O-methyladenosine-3'-phosphate
  modified_base 12: mod_base = OTHER; note = 2'-O-methylcytidine-3'-phosphate
  modified_base 13: mod_base = OTHER; note = 2'-O-methyladenosine-3'-phosphate
  modified_base 14: mod_base = OTHER; note = 2'-fluorocytidine-3'-phosphate
  modified_base 15: mod_base = OTHER; note = 2'-O-methyluridine-3'-phosphate
  modified_base 16: mod_base = OTHER; note = 2'-fluoroadenosine-3'-phosphate
  modified_base 17: mod_base = OTHER; note = 2'-O-methyladenosine-3'-phosphate
  modified_base 18: mod_base = OTHER; note = 2'-O-methylcytidine-3'-phosphate
  modified_base 19: mod_base = OTHER; note = 2'-O-methylcytidine-3'-phosphate
  modified_base 20: mod_base = OTHER; note = 2'-O-methyladenosine-3'-phosphate
  modified_base 21: mod_base = OTHER; note = 2'-O-methylguanosine-3'-phosphorothioate
  modified_base 22: mod_base = OTHER; note = 2'-O-methyluridine-3'-phosphorothioate
  modified_base 23: mod_base = OTHER; note = 2'-O-methyluridine-3'-phosphate
taactatttcacactaaccagtt

SEQ ID NO: 3878 - RNA, 23 nt, synthetic construct
  source 1..23: mol_type = other RNA; note = Description of Artificial Sequence: Synthetic oligonucleotide
  modified_base 1: mod_base = OTHER; note = 2'-O-methyladenosine-3'-phosphorothioate
  modified_base 2: mod_base = OTHER; note = 2'-fluoroadenosine-3'-phosphorothioate
  modified_base 3: mod_base = OTHER; note = 2'-O-methyluridine-3'-phosphate
  modified_base 4: mod_base = OTHER; note = 2'-O-methylguanosine-3'-phosphate
  modified_base 5: mod_base = OTHER; note = 2'-O-methyluridine-3'-phosphate
  modified_base 6: mod_base = OTHER; note = 2'-fluoroadenosine-3'-phosphate
  modified_base 7: mod_base = OTHER; note = 2'-O-methylcytidine-3'-phosphate
  modified_base 8: mod_base = OTHER; note = 2'-fluoroadenosine-3'-phosphate
  modified_base 9: mod_base = OTHER; note = 2'-fluorocytidine-3'-phosphate
  modified_base 10: mod_base = OTHER; note = 2'-O-methyluridine-3'-phosphate
  modified_base 11: mod_base = OTHER; note = 2'-O-methyladenosine-3'-phosphate
  modified_base 12: mod_base = OTHER; note = 2'-O-methylcytidine-3'-phosphate
  modified_base 13: mod_base = OTHER; note = 2'-O-methyluridine-3'-phosphate
  modified_base 14: mod_base = OTHER; note = 2'-fluoroguanosine-3'-phosphate
  modified_base 15: mod_base = OTHER; note = 2'-O-methyladenosine-3'-phosphate
  modified_base 16: mod_base = OTHER; note = 2'-fluorouridine-3'-phosphate
  modified_base 17: mod_base = OTHER; note = 2'-O-methyladenosine-3'-phosphate
  modified_base 18: mod_base = OTHER; note = 2'-O-methyluridine-3'-phosphate
  modified_base 19: mod_base = OTHER; note = 2'-O-methyladenosine-3'-phosphate
  modified_base 20: mod_base = OTHER; note = 2'-O-methylguanosine-3'-phosphate
  modified_base 21: mod_base = OTHER; note = 2'-O-methyluridine-3'-phosphorothioate
  modified_base 22: mod_base = OTHER; note = 2'-O-methyluridine-3'-phosphorothioate
  modified_base 23: mod_base = OTHER; note = 2'-O-methylcytidine-3'-phosphate
aatgtacactactgatatagttc

SEQ ID NO: 3879 - RNA, 23 nt, synthetic construct
  source 1..23: mol_type = other RNA; note = Description of Artificial Sequence: Synthetic oligonucleotide
  modified_base 1: mod_base = OTHER; note = 2'-O-methyluridine-3'-phosphorothioate
  modified_base 2: mod_base = OTHER; note = 2'-fluorouridine -3'-phosphorothioate
  modified_base 3: mod_base = OTHER; note = 2'-O-methyladenosine-3'-phosphate
  modified_base 4: mod_base = OTHER; note = 2'-O-methyladenosine-3'-phosphate
  modified_base 5: mod_base = OTHER; note = 2'-O-methyluridine-3'-phosphate
  modified_base 6: mod_base = OTHER; note = 2'-fluoroguanosine-3'-phosphate
  modified_base 7: mod_base = OTHER; note = 2'-O-methyluridine-3'-phosphate
  modified_base 8: mod_base = OTHER; note = 2'-fluoroadenosine-3'-phosphate
  modified_base 9: mod_base = OTHER; note = 2'-fluorocytidine-3'-phosphate
  modified_base 10: mod_base = OTHER; note = 2'-O-methyladenosine-3'-phosphate
  modified_base 11: mod_base = OTHER; note = 2'-O-methylcytidine-3'-phosphate
  modified_base 12: mod_base = OTHER; note = 2'-O-methyluridine-3'-phosphate
  modified_base 13: mod_base = OTHER; note = 2'-O-methyladenosine-3'-phosphate
  modified_base 14: mod_base = OTHER; note = 2'-fluorocytidine-3'-phosphate
  modified_base 15: mod_base = OTHER; note = 2'-O-methyluridine-3'-phosphate
  modified_base 16: mod_base = OTHER; note = 2'-fluoroguanosine-3'-phosphate
  modified_base 17: mod_base = OTHER; note = 2'-O-methyladenosine-3'-phosphate
  modified_base 18: mod_base = OTHER; note = 2'-O-methyluridine-3'-phosphate
  modified_base 19: mod_base = OTHER; note = 2'-O-methyladenosine-3'-phosphate
  modified_base 20: mod_base = OTHER; note = 2'-O-methyluridine-3'-phosphate
  modified_base 21: mod_base = OTHER; note = 2'-O-methyladenosine-3'-phosphorothioate
  modified_base 22: mod_base = OTHER; note = 2'-O-methylguanosine-3'-phosphorothioate
  modified_base 23: mod_base = OTHER; note = 2'-O-methyluridine-3'-phosphate
ttaatgtacactactgatatagt

SEQ ID NO: 3880 - RNA, 23 nt, synthetic construct
  source 1..23: mol_type = other RNA; note = Description of Artificial Sequence: Synthetic oligonucleotide
  modified_base 1: mod_base = OTHER; note = 2'-O-methyluridine-3'-phosphorothioate
  modified_base 2: mod_base = OTHER; note = 2'-fluoroadenosine-3'-phosphorothioate
  modified_base 3: mod_base = OTHER; note = 2'-O-methylguanosine-3'-phosphate
  modified_base 4: mod_base = OTHER; note = 2'-O-methyluridine-3'-phosphate
  modified_base 5: mod_base = OTHER; note = 2'-O-methylcytidine-3'-phosphate
  modified_base 6: mod_base = OTHER; note = 2'-fluorocytidine-3'-phosphate
  modified_base 7: mod_base = OTHER; note = 2'-O-methyladenosine-3'-phosphate
  modified_base 8: mod_base = OTHER; note = 2'-fluorouridine-3'-phosphate
  modified_base 9: mod_base = OTHER; note = 2'-fluorocytidine-3'-phosphate
  modified_base 10: mod_base = OTHER; note = 2'-O-methyluridine-3'-phosphate
  modified_base 11: mod_base = OTHER; note = 2'-O-methyluridine-3'-phosphate
  modified_base 12: mod_base = OTHER; note = 2'-O-methyladenosine-3'-phosphate
  modified_base 13: mod_base = OTHER; note = 2'-O-methyladenosine-3'-phosphate
  modified_base 14: mod_base = OTHER; note = 2'-fluoroadenosine-3'-phosphate
  modified_base 15: mod_base = OTHER; note = 2'-O-methyladenosine-3'-phosphate
  modified_base 16: mod_base = OTHER; note = 2'-fluorouridine-3'-phosphate
  modified_base 17: mod_base = OTHER; note = 2'-O-methyladenosine-3'-phosphate
  modified_base 18: mod_base = OTHER; note = 2'-O-methyluridine-3'-phosphate
  modified_base 19: mod_base = OTHER; note = 2'-O-methyluridine-3'-phosphate
  modified_base 20: mod_base = OTHER; note = 2'-O-methyladenosine-3'-phosphate
  modified_base 21: mod_base = OTHER; note = 2'-O-methylcytidine-3'-phosphorothioate
  modified_base 22: mod_base = OTHER; note = 2'-O-methyluridine-3'-phosphorothioate
  modified_base 23: mod_base = OTHER; note = 2'-O-methylguanosine-3'-phosphate
tagtccatcttaaaatattactg

SEQ ID NO: 3881 - RNA, 23 nt, synthetic construct
  source 1..23: mol_type = other RNA; note = Description of Artificial Sequence: Synthetic oligonucleotide
  modified_base 1: mod_base = OTHER; note = 2'-O-methyluridine-3'-phosphorothioate
  modified_base 2: mod_base = OTHER; note = 2'-fluorouridine -3'-phosphorothioate
  modified_base 3: mod_base = OTHER; note = 2'-O-methyluridine-3'-phosphate
  modified_base 4: mod_base = OTHER; note = 2'-O-methyluridine-3'-phosphate
  modified_base 5: mod_base = OTHER; note = 2'-O-methylcytidine-3'-phosphate
  modified_base 6: mod_base = OTHER; note = 2'-fluorocytidine-3'-phosphate
  modified_base 7: mod_base = OTHER; note = 2'-O-methylcytidine-3'-phosphate
  modified_base 8: mod_base = OTHER; note = 2'-fluoroadenosine-3'-phosphate
  modified_base 9: mod_base = OTHER; note = 2'-fluoroguanosine-3'-phosphate
  modified_base 10: mod_base = OTHER; note = 2'-O-methyluridine-3'-phosphate
  modified_base 11: mod_base = OTHER; note = 2'-O-methylcytidine-3'-phosphate
  modified_base 12: mod_base = OTHER; note = 2'-O-methylcytidine-3'-phosphate
  modified_base 13: mod_base = OTHER; note = 2'-O-methyladenosine-3'-phosphate
  modified_base 14: mod_base = OTHER; note = 2'-fluorouridine-3'-phosphate
  modified_base 15: mod_base = OTHER; note = 2'-O-methylcytidine-3'-phosphate
  modified_base 16: mod_base = OTHER; note = 2'-fluorouridine-3'-phosphate
  modified_base 17: mod_base = OTHER; note = 2'-O-methyluridine-3'-phosphate
  modified_base 18: mod_base = OTHER; note = 2'-O-methyladenosine-3'-phosphate
  modified_base 19: mod_base = OTHER; note = 2'-O-methyladenosine-3'-phosphate
  modified_base 20: mod_base = OTHER; note = 2'-O-methyladenosine-3'-phosphate
  modified_base 21: mod_base = OTHER; note = 2'-O-methyladenosine-3'-phosphorothioate
  modified_base 22: mod_base = OTHER; note = 2'-O-methyluridine-3'-phosphorothioate
  modified_base 23: mod_base = OTHER; note = 2'-O-methyladenosine-3'-phosphate
ttttcccagtccatcttaaaata

SEQ ID NO: 3882 - RNA, 23 nt, synthetic construct
  source 1..23: mol_type = other RNA; note = Description of Artificial Sequence: Synthetic oligonucleotide
  modified_base 1: mod_base = OTHER; note = 2'-O-methyluridine-3'-phosphorothioate
  modified_base 2: mod_base = OTHER; note = 2'-fluoroguanosine-3'-phosphorothioate
  modified_base 3: mod_base = OTHER; note = 2'-O-methyladenosine-3'-phosphate
  modified_base 4: mod_base = OTHER; note = 2'-O-methylcytidine-3'-phosphate
  modified_base 5: mod_base = OTHER; note = 2'-O-methyluridine-3'-phosphate
  modified_base 6: mod_base = OTHER; note = 2'-fluoroadenosine-3'-phosphate
  modified_base 7: mod_base = OTHER; note = 2'-O-methylguanosine-3'-phosphate
  modified_base 8: mod_base = OTHER; note = 2'-fluoroguanosine-3'-phosphate
  modified_base 9: mod_base = OTHER; note = 2'-fluorocytidine-3'-phosphate
  modified_base 10: mod_base = OTHER; note = 2'-O-methyladenosine-3'-phosphate
  modified_base 11: mod_base = OTHER; note = 2'-O-methyluridine-3'-phosphate
  modified_base 12: mod_base = OTHER; note = 2'-O-methylguanosine-3'-phosphate
  modified_base 13: mod_base = OTHER; note = 2'-O-methyluridine-3'-phosphate
  modified_base 14: mod_base = OTHER; note = 2'-fluorouridine-3'-phosphate
  modified_base 15: mod_base = OTHER; note = 2'-O-methylcytidine-3'-phosphate
  modified_base 16: mod_base = OTHER; note = 2'-fluoroadenosine-3'-phosphate
  modified_base 17: mod_base = OTHER; note = 2'-O-methylguanosine-3'-phosphate
  modified_base 18: mod_base = OTHER; note = 2'-O-methyluridine-3'-phosphate
  modified_base 19: mod_base = OTHER; note = 2'-O-methylguanosine-3'-phosphate
  modified_base 20: mod_base = OTHER; note = 2'-O-methyladenosine-3'-phosphate
  modified_base 21: mod_base = OTHER; note = 2'-O-methyladenosine-3'-phosphorothioate
  modified_base 22: mod_base = OTHER; note = 2'-O-methylguanosine-3'-phosphorothioate
  modified_base 23: mod_base = OTHER; note = 2'-O-methylguanosine-3'-phosphate
tgactaggcatgttcagtgaagg

SEQ ID NO: 3883 - RNA, 23 nt, synthetic construct
  source 1..23: mol_type = other RNA; note = Description of Artificial Sequence: Synthetic oligonucleotide
  modified_base 1: mod_base = OTHER; note = 2'-O-methyluridine-3'-phosphorothioate
  modified_base 2: mod_base = OTHER; note = 2'-fluoroadenosine-3'-phosphorothioate
  modified_base 3: mod_base = OTHER; note = 2'-O-methyluridine-3'-phosphate
  modified_base 4: mod_base = OTHER; note = 2'-O-methyladenosine-3'-phosphate
  modified_base 5: mod_base = OTHER; note = 2'-O-methyladenosine-3'-phosphate
  modified_base 6: mod_base = OTHER; note = 2'-fluorocytidine-3'-phosphate
  modified_base 7: mod_base = OTHER; note = 2'-O-methyladenosine-3'-phosphate
  modified_base 8: mod_base = OTHER; note = 2'-fluorocytidine-3'-phosphate
  modified_base 9: mod_base = OTHER; note = 2'-fluorouridine-3'-phosphate
  modified_base 10: mod_base = OTHER; note = 2'-O-methyluridine-3'-phosphate
  modified_base 11: mod_base = OTHER; note = 2'-O-methylguanosine-3'-phosphate
  modified_base 12: mod_base = OTHER; note = 2'-O-methylguanosine-3'-phosphate
  modified_base 13: mod_base = OTHER; note = 2'-O-methyladenosine-3'-phosphate
  modified_base 14: mod_base = OTHER; note = 2'-fluorouridine-3'-phosphate
  modified_base 15: mod_base = OTHER; note = 2'-O-methyladenosine-3'-phosphate
  modified_base 16: mod_base = OTHER; note = 2'-fluoroguanosine-3'-phosphate
  modified_base 17: mod_base = OTHER; note = 2'-O-methyluridine-3'-phosphate
  modified_base 18: mod_base = OTHER; note = 2'-O-methyluridine-3'-phosphate
  modified_base 19: mod_base = OTHER; note = 2'-O-methylguanosine-3'-phosphate
  modified_base 20: mod_base = OTHER; note = 2'-O-methylguanosine-3'-phosphate
  modified_base 21: mod_base = OTHER; note = 2'-O-methyluridine-3'-phosphorothioate
  modified_base 22: mod_base = OTHER; note = 2'-O-methyluridine-3'-phosphorothioate
  modified_base 23: mod_base = OTHER; note = 2'-O-methylguanosine-3'-phosphate
tataacacttggatagttggttg

SEQ ID NO: 3884 - RNA, 23 nt, synthetic construct
  source 1..23: mol_type = other RNA; note = Description of Artificial Sequence: Synthetic oligonucleotide
  modified_base 1: mod_base = OTHER; note = 2'-O-methyluridine-3'-phosphorothioate
  modified_base 2: mod_base = OTHER; note = 2'-fluorouridine -3'-phosphorothioate
  modified_base 3: mod_base = OTHER; note = 2'-O-methyluridine-3'-phosphate
  modified_base 4: mod_base = OTHER; note = 2'-O-methyladenosine-3'-phosphate
  modified_base 5: mod_base = OTHER; note = 2'-O-methylguanosine-3'-phosphate
  modified_base 6: mod_base = OTHER; note = 2'-fluorouridine-3'-phosphate
  modified_base 7: mod_base = OTHER; note = 2'-O-methyluridine-3'-phosphate
  modified_base 8: mod_base = OTHER; note = 2'-fluoroguanosine-3'-phosphate
  modified_base 9: mod_base = OTHER; note = 2'-fluoroguanosine-3'-phosphate
  modified_base 10: mod_base = OTHER; note = 2'-O-methyluridine-3'-phosphate
  modified_base 11: mod_base = OTHER; note = 2'-O-methyladenosine-3'-phosphate
  modified_base 12: mod_base = OTHER; note = 2'-O-methyluridine-3'-phosphate
  modified_base 13: mod_base = OTHER; note = 2'-O-methyladenosine-3'-phosphate
  modified_base 14: mod_base = OTHER; note = 2'-fluoroadenosine-3'-phosphate
  modified_base 15: mod_base = OTHER; note = 2'-O-methylcytidine-3'-phosphate
  modified_base 16: mod_base = OTHER; note = 2'-fluoroadenosine-3'-phosphate
  modified_base 17: mod_base = OTHER; note = 2'-O-methylcytidine-3'-phosphate
  modified_base 18: mod_base = OTHER; note = 2'-O-methyluridine-3'-phosphate
  modified_base 19: mod_base = OTHER; note = 2'-O-methyluridine-3'-phosphate
  modified_base 20: mod_base = OTHER; note = 2'-O-methylguanosine-3'-phosphate
  modified_base 21: mod_base = OTHER; note = 2'-O-methylguanosine-3'-phosphorothioate
  modified_base 22: mod_base = OTHER; note = 2'-O-methyladenosine-3'-phosphorothioate
  modified_base 23: mod_base = OTHER; note = 2'-O-methyluridine-3'-phosphate
tttagttggtataacacttggat

SEQ ID NO: 3885 - RNA, 23 nt, synthetic construct
  source 1..23: mol_type = other RNA; note = Description of Artificial Sequence: Synthetic oligonucleotide
  modified_base 1: mod_base = OTHER; note = 2'-O-methyladenosine-3'-phosphorothioate
  modified_base 2: mod_base = OTHER; note = 2'-fluoroguanosine-3'-phosphorothioate
  modified_base 3: mod_base = OTHER; note = 2'-O-methyluridine-3'-phosphate
  modified_base 4: mod_base = OTHER; note = 2'-O-methylcytidine-3'-phosphate
  modified_base 5: mod_base = OTHER; note = 2'-O-methylcytidine-3'-phosphate
  modified_base 6: mod_base = OTHER; note = 2'-fluoroadenosine-3'-phosphate
  modified_base 7: mod_base = OTHER; note = 2'-O-methyluridine-3'-phosphate
  modified_base 8: mod_base = OTHER; note = 2'-fluorocytidine-3'-phosphate
  modified_base 9: mod_base = OTHER; note = 2'-fluorouridine-3'-phosphate
  modified_base 10: mod_base = OTHER; note = 2'-O-methyluridine-3'-phosphate
  modified_base 11: mod_base = OTHER; note = 2'-O-methyladenosine-3'-phosphate
  modified_base 12: mod_base = OTHER; note = 2'-O-methyladenosine-3'-phosphate
  modified_base 13: mod_base = OTHER; note = 2'-O-methyladenosine-3'-phosphate
  modified_base 14: mod_base = OTHER; note = 2'-fluoroadenosine-3'-phosphate
  modified_base 15: mod_base = OTHER; note = 2'-O-methyluridine-3'-phosphate
  modified_base 16: mod_base = OTHER; note = 2'-fluoroadenosine-3'-phosphate
  modified_base 17: mod_base = OTHER; note = 2'-O-methyluridine-3'-phosphate
  modified_base 18: mod_base = OTHER; note = 2'-O-methyluridine-3'-phosphate
  modified_base 19: mod_base = OTHER; note = 2'-O-methyladenosine-3'-phosphate
  modified_base 20: mod_base = OTHER; note = 2'-O-methylcytidine-3'-phosphate
  modified_base 21: mod_base = OTHER; note = 2'-O-methyluridine-3'-phosphorothioate
  modified_base 22: mod_base = OTHER; note = 2'-O-methylguanosine-3'-phosphorothioate
  modified_base 23: mod_base = OTHER; note = 2'-O-methylcytidine-3'-phosphate
agtccatcttaaaatattactgc

SEQ ID NO: 3886 - RNA, 23 nt, synthetic construct
  source 1..23: mol_type = other RNA; note = Description of Artificial Sequence: Synthetic oligonucleotide
  modified_base 1: mod_base = OTHER; note = 2'-O-methyluridine-3'-phosphorothioate
  modified_base 2: mod_base = OTHER; note = 2'-fluoroadenosine-3'-phosphorothioate
  modified_base 3: mod_base = OTHER; note = 2'-O-methylguanosine-3'-phosphate
  modified_base 4: mod_base = OTHER; note = 2'-O-methylguanosine-3'-phosphate
  modified_base 5: mod_base = OTHER; note = 2'-O-methyladenosine-3'-phosphate
  modified_base 6: mod_base = OTHER; note = 2'-fluorouridine-3'-phosphate
  modified_base 7: mod_base = OTHER; note = 2'-O-methyladenosine-3'-phosphate
  modified_base 8: mod_base = OTHER; note = 2'-fluorouridine-3'-phosphate
  modified_base 9: mod_base = OTHER; note = 2'-fluoroadenosine-3'-phosphate
  modified_base 10: mod_base = OTHER; note = 2'-O-methylguanosine-3'-phosphate
  modified_base 11: mod_base = OTHER; note = 2'-O-methylcytidine-3'-phosphate
  modified_base 12: mod_base = OTHER; note = 2'-O-methyluridine-3'-phosphate
  modified_base 13: mod_base = OTHER; note = 2'-O-methylguanosine-3'-phosphate
  modified_base 14: mod_base = OTHER; note = 2'-fluorouridine-3'-phosphate
  modified_base 15: mod_base = OTHER; note = 2'-O-methylguanosine-3'-phosphate
  modified_base 16: mod_base = OTHER; note = 2'-fluoroguanosine-3'-phosphate
  modified_base 17: mod_base = OTHER; note = 2'-O-methyladenosine-3'-phosphate
  modified_base 18: mod_base = OTHER; note = 2'-O-methyluridine-3'-phosphate
  modified_base 19: mod_base = OTHER; note = 2'-O-methyluridine-3'-phosphate
  modified_base 20: mod_base = OTHER; note = 2'-O-methyluridine-3'-phosphate
  modified_base 21: mod_base = OTHER; note = 2'-O-methyluridine-3'-phosphorothioate
  modified_base 22: mod_base = OTHER; note = 2'-O-methyladenosine-3'-phosphorothioate
  modified_base 23: mod_base = OTHER; note = 2'-O-methylcytidine-3'-phosphate
taggatatagctgtggattttac

SEQ ID NO: 3887 - RNA, 23 nt, synthetic construct
  source 1..23: mol_type = other RNA; note = Description of Artificial Sequence: Synthetic oligonucleotide
  modified_base 1: mod_base = OTHER; note = 2'-O-methyluridine-3'-phosphorothioate
  modified_base 2: mod_base = OTHER; note = 2'-fluorouridine -3'-phosphorothioate
  modified_base 3: mod_base = OTHER; note = 2'-O-methyladenosine-3'-phosphate
  modified_base 4: mod_base = OTHER; note = 2'-O-methylguanosine-3'-phosphate
  modified_base 5: mod_base = OTHER; note = 2'-O-methylguanosine-3'-phosphate
  modified_base 6: mod_base = OTHER; note = 2'-fluorocytidine-3'-phosphate
  modified_base 7: mod_base = OTHER; note = 2'-O-methyladenosine-3'-phosphate
  modified_base 8: mod_base = OTHER; note = 2'-fluorouridine-3'-phosphate
  modified_base 9: mod_base = OTHER; note = 2'-fluoroguanosine-3'-phosphate
  modified_base 10: mod_base = OTHER; note = 2'-O-methyluridine-3'-phosphate
  modified_base 11: mod_base = OTHER; note = 2'-O-methyluridine-3'-phosphate
  modified_base 12: mod_base = OTHER; note = 2'-O-methylcytidine-3'-phosphate
  modified_base 13: mod_base = OTHER; note = 2'-O-methyladenosine-3'-phosphate
  modified_base 14: mod_base = OTHER; note = 2'-fluoroguanosine-3'-phosphate
  modified_base 15: mod_base = OTHER; note = 2'-O-methyluridine-3'-phosphate
  modified_base 16: mod_base = OTHER; note = 2'-fluoroguanosine-3'-phosphate
  modified_base 17: mod_base = OTHER; note = 2'-O-methyladenosine-3'-phosphate
  modified_base 18: mod_base = OTHER; note = 2'-O-methyladenosine-3'-phosphate
  modified_base 19: mod_base = OTHER; note = 2'-O-methylguanosine-3'-phosphate
  modified_base 20: mod_base = OTHER; note = 2'-O-methylguanosine-3'-phosphate
  modified_base 21: mod_base = OTHER; note = 2'-O-methyladenosine-3'-phosphorothioate
  modified_base 22: mod_base = OTHER; note = 2'-O-methylguanosine-3'-phosphorothioate
  modified_base 23: mod_base = OTHER; note = 2'-O-methylcytidine-3'-phosphate
ttaggcatgttcagtgaaggagc

SEQ ID NO: 3888 - RNA, 23 nt, synthetic construct
  source 1..23: mol_type = other RNA; note = Description of Artificial Sequence: Synthetic oligonucleotide
  modified_base 1: mod_base = OTHER; note = 2'-O-methyluridine-3'-phosphorothioate
  modified_base 2: mod_base = OTHER; note = 2'-fluorouridine -3'-phosphorothioate
  modified_base 3: mod_base = OTHER; note = 2'-O-methylguanosine-3'-phosphate
  modified_base 4: mod_base = OTHER; note = 2'-O-methylguanosine-3'-phosphate
  modified_base 5: mod_base = OTHER; note = 2'-O-methyladenosine-3'-phosphate
  modified_base 6: mod_base = OTHER; note = 2'-fluorocytidine-3'-phosphate
  modified_base 7: mod_base = OTHER; note = 2'-O-methyluridine-3'-phosphate
  modified_base 8: mod_base = OTHER; note = 2'-fluoroadenosine-3'-phosphate
  modified_base 9: mod_base = OTHER; note = 2'-fluoroguanosine-3'-phosphate
  modified_base 10: mod_base = OTHER; note = 2'-O-methylguanosine-3'-phosphate
  modified_base 11: mod_base = OTHER; note = 2'-O-methylcytidine-3'-phosphate
  modified_base 12: mod_base = OTHER; note = 2'-O-methyladenosine-3'-phosphate
  modified_base 13: mod_base = OTHER; note = 2'-O-methyluridine-3'-phosphate
  modified_base 14: mod_base = OTHER; note = 2'-fluoroguanosine-3'-phosphate
  modified_base 15: mod_base = OTHER; note = 2'-O-methyluridine-3'-phosphate
  modified_base 16: mod_base = OTHER; note = 2'-fluorouridine-3'-phosphate
  modified_base 17: mod_base = OTHER; note = 2'-O-methylcytidine-3'-phosphate
  modified_base 18: mod_base = OTHER; note = 2'-O-methyladenosine-3'-phosphate
  modified_base 19: mod_base = OTHER; note = 2'-O-methylguanosine-3'-phosphate
  modified_base 20: mod_base = OTHER; note = 2'-O-methyluridine-3'-phosphate
  modified_base 21: mod_base = OTHER; note = 2'-O-methylguanosine-3'-phosphorothioate
  modified_base 22: mod_base = OTHER; note = 2'-O-methyladenosine-3'-phosphorothioate
  modified_base 23: mod_base = OTHER; note = 2'-O-methyladenosine-3'-phosphate
ttggactaggcatgttcagtgaa

SEQ ID NO: 3889 - RNA, 23 nt, synthetic construct
  source 1..23: mol_type = other RNA; note = Description of Artificial Sequence: Synthetic oligonucleotide
  modified_base 1: mod_base = OTHER; note = 2'-O-methylguanosine-3'-phosphorothioate
  modified_base 2: mod_base = OTHER; note = 2'-fluorouridine -3'-phosphorothioate
  modified_base 3: mod_base = OTHER; note = 2'-O-methyluridine-3'-phosphate
  modified_base 4: mod_base = OTHER; note = 2'-O-methyluridine-3'-phosphate
  modified_base 5: mod_base = OTHER; note = 2'-O-methyluridine-3'-phosphate
  modified_base 6: mod_base = OTHER; note = 2'-fluoroadenosine-3'-phosphate
  modified_base 7: mod_base = OTHER; note = 2'-O-methylguanosine-3'-phosphate
  modified_base 8: mod_base = OTHER; note = 2'-fluorouridine-3'-phosphate
  modified_base 9: mod_base = OTHER; note = 2'-fluorouridine-3'-phosphate
  modified_base 10: mod_base = OTHER; note = 2'-O-methylguanosine-3'-phosphate
  modified_base 11: mod_base = OTHER; note = 2'-O-methylguanosine-3'-phosphate
  modified_base 12: mod_base = OTHER; note = 2'-O-methyluridine-3'-phosphate
  modified_base 13: mod_base = OTHER; note = 2'-O-methyladenosine-3'-phosphate
  modified_base 14: mod_base = OTHER; note = 2'-fluorouridine-3'-phosphate
  modified_base 15: mod_base = OTHER; note = 2'-O-methyladenosine-3'-phosphate
  modified_base 16: mod_base = OTHER; note = 2'-fluoroadenosine-3'-phosphate
  modified_base 17: mod_base = OTHER; note = 2'-O-methylcytidine-3'-phosphate
  modified_base 18: mod_base = OTHER; note = 2'-O-methyladenosine-3'-phosphate
  modified_base 19: mod_base = OTHER; note = 2'-O-methylcytidine-3'-phosphate
  modified_base 20: mod_base = OTHER; note = 2'-O-methyluridine-3'-phosphate
  modified_base 21: mod_base = OTHER; note = 2'-O-methyluridine-3'-phosphorothioate
  modified_base 22: mod_base = OTHER; note = 2'-O-methylguanosine-3'-phosphorothioate
  modified_base 23: mod_base = OTHER; note = 2'-O-methylguanosine-3'-phosphate
gttttagttggtataacacttgg

SEQ ID NO: 3890 - RNA, 23 nt, synthetic construct
  source 1..23: mol_type = other RNA; note = Description of Artificial Sequence: Synthetic oligonucleotide
  modified_base 1: mod_base = OTHER; note = 2'-O-methyladenosine-3'-phosphorothioate
  modified_base 2: mod_base = OTHER; note = 2'-fluoroguanosine-3'-phosphorothioate
  modified_base 3: mod_base = OTHER; note = 2'-O-methyladenosine-3'-phosphate
  modified_base 4: mod_base = OTHER; note = 2'-O-methylcytidine-3'-phosphate
  modified_base 5: mod_base = OTHER; note = 2'-O-methylcytidine-3'-phosphate
  modified_base 6: mod_base = OTHER; note = 2'-fluorocytidine-3'-phosphate
  modified_base 7: mod_base = OTHER; note = 2'-O-methyluridine-3'-phosphate
  modified_base 8: mod_base = OTHER; note = 2'-fluorouridine-3'-phosphate
  modified_base 9: mod_base = OTHER; note = 2'-fluoroadenosine-3'-phosphate
  modified_base 10: mod_base = OTHER; note = 2'-O-methyladenosine-3'-phosphate
  modified_base 11: mod_base = OTHER; note = 2'-O-methyluridine-3'-phosphate
  modified_base 12: mod_base = OTHER; note = 2'-O-methylcytidine-3'-phosphate
  modified_base 13: mod_base = OTHER; note = 2'-O-methyladenosine-3'-phosphate
  modified_base 14: mod_base = OTHER; note = 2'-fluorouridine-3'-phosphate
  modified_base 15: mod_base = OTHER; note = 2'-O-methylguanosine-3'-phosphate
  modified_base 16: mod_base = OTHER; note = 2'-fluoroguanosine-3'-phosphate
  modified_base 17: mod_base = OTHER; note = 2'-O-methyluridine-3'-phosphate
  modified_base 18: mod_base = OTHER; note = 2'-O-methylguanosine-3'-phosphate
  modified_base 19: mod_base = OTHER; note = 2'-O-methylguanosine-3'-phosphate
  modified_base 20: mod_base = OTHER; note = 2'-O-methyladenosine-3'-phosphate
  modified_base 21: mod_base = OTHER; note = 2'-O-methyladenosine-3'-phosphorothioate
  modified_base 22: mod_base = OTHER; note = 2'-O-methyladenosine-3'-phosphorothioate
  modified_base 23: mod_base = OTHER; note = 2'-O-methylcytidine-3'-phosphate
agacccttaatcatggtggaaac

SEQ ID NO: 3891 - RNA, 23 nt, synthetic construct
  source 1..23: mol_type = other RNA; note = Description of Artificial Sequence: Synthetic oligonucleotide
  modified_base 1: mod_base = OTHER; note = 2'-O-methyladenosine-3'-phosphorothioate
  modified_base 2: mod_base = OTHER; note = 2'-fluoroadenosine-3'-phosphorothioate
  modified_base 3: mod_base = OTHER; note = 2'-O-methyluridine-3'-phosphate
  modified_base 4: mod_base = OTHER; note = 2'-O-methylguanosine-3'-phosphate
  modified_base 5: mod_base = OTHER; note = 2'-O-methyluridine-3'-phosphate
  modified_base 6: mod_base = OTHER; note = 2'-fluorouridine-3'-phosphate
  modified_base 7: mod_base = OTHER; note = 2'-O-methylguanosine-3'-phosphate
  modified_base 8: mod_base = OTHER; note = 2'-fluoroguanosine-3'-phosphate
  modified_base 9: mod_base = OTHER; note = 2'-fluoroadenosine-3'-phosphate
  modified_base 10: mod_base = OTHER; note = 2'-O-methylcytidine-3'-phosphate
  modified_base 11: mod_base = OTHER; note = 2'-O-methyluridine-3'-phosphate
  modified_base 12: mod_base = OTHER; note = 2'-O-methyladenosine-3'-phosphate
  modified_base 13: mod_base = OTHER; note = 2'-O-methylguanosine-3'-phosphate
  modified_base 14: mod_base = OTHER; note = 2'-fluoroguanosine-3'-phosphate
  modified_base 15: mod_base = OTHER; note = 2'-O-methylcytidine-3'-phosphate
  modified_base 16: mod_base = OTHER; note = 2'-fluoroadenosine-3'-phosphate
  modified_base 17: mod_base = OTHER; note = 2'-O-methyluridine-3'-phosphate
  modified_base 18: mod_base = OTHER; note = 2'-O-methylguanosine-3'-phosphate
  modified_base 19: mod_base = OTHER; note = 2'-O-methyluridine-3'-phosphate
  modified_base 20: mod_base = OTHER; note = 2'-O-methyluridine-3'-phosphate
  modified_base 21: mod_base = OTHER; note = 2'-O-methylcytidine-3'-phosphorothioate
  modified_base 22: mod_base = OTHER; note = 2'-O-methyladenosine-3'-phosphorothioate
  modified_base 23: mod_base = OTHER; note = 2'-O-methylguanosine-3'-phosphate
aatgttggactaggcatgttcag

SEQ ID NO: 3892 - RNA, 23 nt, synthetic construct
  source 1..23: mol_type = other RNA; note = Description of Artificial Sequence: Synthetic oligonucleotide
  modified_base 1: mod_base = OTHER; note = 2'-O-methyladenosine-3'-phosphorothioate
  modified_base 2: mod_base = OTHER; note = 2'-fluorouridine -3'-phosphorothioate
  modified_base 3: mod_base = OTHER; note = 2'-O-methylguanosine-3'-phosphate
  modified_base 4: mod_base = OTHER; note = 2'-O-methylguanosine-3'-phosphate
  modified_base 5: mod_base = OTHER; note = 2'-O-methyluridine-3'-phosphate
  modified_base 6: mod_base = OTHER; note = 2'-fluoroadenosine-3'-phosphate
  modified_base 7: mod_base = OTHER; note = 2'-O-methyladenosine-3'-phosphate
  modified_base 8: mod_base = OTHER; note = 2'-fluorouridine-3'-phosphate
  modified_base 9: mod_base = OTHER; note = 2'-fluoroguanosine-3'-phosphate
  modified_base 10: mod_base = OTHER; note = 2'-O-methyluridine-3'-phosphate
  modified_base 11: mod_base = OTHER; note = 2'-O-methyladenosine-3'-phosphate
  modified_base 12: mod_base = OTHER; note = 2'-O-methylcytidine-3'-phosphate
  modified_base 13: mod_base = OTHER; note = 2'-O-methyladenosine-3'-phosphate
  modified_base 14: mod_base = OTHER; note = 2'-fluorocytidine-3'-phosphate
  modified_base 15: mod_base = OTHER; note = 2'-O-methyluridine-3'-phosphate
  modified_base 16: mod_base = OTHER; note = 2'-fluoroadenosine-3'-phosphate
  modified_base 17: mod_base = OTHER; note = 2'-O-methylcytidine-3'-phosphate
  modified_base 18: mod_base = OTHER; note = 2'-O-methyluridine-3'-phosphate
  modified_base 19: mod_base = OTHER; note = 2'-O-methylguanosine-3'-phosphate
  modified_base 20: mod_base = OTHER; note = 2'-O-methyladenosine-3'-phosphate
  modified_base 21: mod_base = OTHER; note = 2'-O-methyluridine-3'-phosphorothioate
  modified_base 22: mod_base = OTHER; note = 2'-O-methyladenosine-3'-phosphorothioate
  modified_base 23: mod_base = OTHER; note = 2'-O-methyluridine-3'-phosphate
atggtaatgtacactactgatat

SEQ ID NO: 3893 - RNA, 23 nt, synthetic construct
  source 1..23: mol_type = other RNA; note = Description of Artificial Sequence: Synthetic oligonucleotide
  modified_base 1: mod_base = OTHER; note = 2'-O-methyluridine-3'-phosphorothioate
  modified_base 2: mod_base = OTHER; note = 2'-fluoroadenosine-3'-phosphorothioate
  modified_base 3: mod_base = OTHER; note = 2'-O-methylguanosine-3'-phosphate
  modified_base 4: mod_base = OTHER; note = 2'-O-methyluridine-3'-phosphate
  modified_base 5: mod_base = OTHER; note = 2'-O-methyluridine-3'-phosphate
  modified_base 6: mod_base = OTHER; note = 2'-fluoroguanosine-3'-phosphate
  modified_base 7: mod_base = OTHER; note = 2'-O-methylguanosine-3'-phosphate
  modified_base 8: mod_base = OTHER; note = 2'-fluorouridine-3'-phosphate
  modified_base 9: mod_base = OTHER; note = 2'-fluoroadenosine-3'-phosphate
  modified_base 10: mod_base = OTHER; note = 2'-O-methyluridine-3'-phosphate
  modified_base 11: mod_base = OTHER; note = 2'-O-methyladenosine-3'-phosphate
  modified_base 12: mod_base = OTHER; note = 2'-O-methyladenosine-3'-phosphate
  modified_base 13: mod_base = OTHER; note = 2'-O-methylcytidine-3'-phosphate
  modified_base 14: mod_base = OTHER; note = 2'-fluoroadenosine-3'-phosphate
  modified_base 15: mod_base = OTHER; note = 2'-O-methylcytidine-3'-phosphate
  modified_base 16: mod_base = OTHER; note = 2'-fluorouridine-3'-phosphate
  modified_base 17: mod_base = OTHER; note = 2'-O-methyluridine-3'-phosphate
  modified_base 18: mod_base = OTHER; note = 2'-O-methylguanosine-3'-phosphate
  modified_base 19: mod_base = OTHER; note = 2'-O-methylguanosine-3'-phosphate
  modified_base 20: mod_base = OTHER; note = 2'-O-methyladenosine-3'-phosphate
  modified_base 21: mod_base = OTHER; note = 2'-O-methyluridine-3'-phosphorothioate
  modified_base 22: mod_base = OTHER; note = 2'-O-methyladenosine-3'-phosphorothioate
  modified_base 23: mod_base = OTHER; note = 2'-O-methylguanosine-3'-phosphate
tagttggtataacacttggatag

SEQ ID NO: 3894 - RNA, 23 nt, synthetic construct
  source 1..23: mol_type = other RNA; note = Description of Artificial Sequence: Synthetic oligonucleotide
  modified_base 1: mod_base = OTHER; note = 2'-O-methyluridine-3'-phosphorothioate
  modified_base 2: mod_base = OTHER; note = 2'-fluoroadenosine-3'-phosphorothioate
  modified_base 3: mod_base = OTHER; note = 2'-O-methylguanosine-3'-phosphate
  modified_base 4: mod_base = OTHER; note = 2'-O-methyluridine-3'-phosphate
  modified_base 5: mod_base = OTHER; note = 2'-O-methyluridine-3'-phosphate
  modified_base 6: mod_base = OTHER; note = 2'-fluoroguanosine-3'-phosphate
  modified_base 7: mod_base = OTHER; note = 2'-O-methylcytidine-3'-phosphate
  modified_base 8: mod_base = OTHER; note = 2'-fluorocytidine-3'-phosphate
  modified_base 9: mod_base = OTHER; note = 2'-fluoroadenosine-3'-phosphate
  modified_base 10: mod_base = OTHER; note = 2'-O-methyluridine-3'-phosphate
  modified_base 11: mod_base = OTHER; note = 2'-O-methyladenosine-3'-phosphate
  modified_base 12: mod_base = OTHER; note = 2'-O-methyluridine-3'-phosphate
  modified_base 13: mod_base = OTHER; note = 2'-O-methyluridine-3'-phosphate
  modified_base 14: mod_base = OTHER; note = 2'-fluoroguanosine-3'-phosphate
  modified_base 15: mod_base = OTHER; note = 2'-O-methylguanosine-3'-phosphate
  modified_base 16: mod_base = OTHER; note = 2'-fluoroadenosine-3'-phosphate
  modified_base 17: mod_base = OTHER; note = 2'-O-methylcytidine-3'-phosphate
  modified_base 18: mod_base = OTHER; note = 2'-O-methyluridine-3'-phosphate
  modified_base 19: mod_base = OTHER; note = 2'-O-methyluridine-3'-phosphate
  modified_base 20: mod_base = OTHER; note = 2'-O-methylguanosine-3'-phosphate
  modified_base 21: mod_base = OTHER; note = 2'-O-methylguanosine-3'-phosphorothioate
  modified_base 22: mod_base = OTHER; note = 2'-O-methyladenosine-3'-phosphorothioate
  modified_base 23: mod_base = OTHER; note = 2'-O-methyladenosine-3'-phosphate
tagttgccatattggacttggaa

SEQ ID NO: 3895 - RNA, 23 nt, synthetic construct
  source 1..23: mol_type = other RNA; note = Description of Artificial Sequence: Synthetic oligonucleotide
  modified_base 1: mod_base = OTHER; note = 2'-O-methyluridine-3'-phosphorothioate
  modified_base 2: mod_base = OTHER; note = 2'-fluoroguanosine-3'-phosphorothioate
  modified_base 3: mod_base = OTHER; note = 2'-O-methyluridine-3'-phosphate
  modified_base 4: mod_base = OTHER; note = 2'-O-methyladenosine-3'-phosphate
  modified_base 5: mod_base = OTHER; note = 2'-O-methylguanosine-3'-phosphate
  modified_base 6: mod_base = OTHER; note = 2'-fluorocytidine-3'-phosphate
  modified_base 7: mod_base = OTHER; note = 2'-O-methylcytidine-3'-phosphate
  modified_base 8: mod_base = OTHER; note = 2'-fluorouridine-3'-phosphate
  modified_base 9: mod_base = OTHER; note = 2'-fluoroadenosine-3'-phosphate
  modified_base 10: mod_base = OTHER; note = 2'-O-methylguanosine-3'-phosphate
  modified_base 11: mod_base = OTHER; note = 2'-O-methyladenosine-3'-phosphate
  modified_base 12: mod_base = OTHER; note = 2'-O-methylcytidine-3'-phosphate
  modified_base 13: mod_base = OTHER; note = 2'-O-methyladenosine-3'-phosphate
  modified_base 14: mod_base = OTHER; note = 2'-fluoroguanosine-3'-phosphate
  modified_base 15: mod_base = OTHER; note = 2'-O-methyluridine-3'-phosphate
  modified_base 16: mod_base = OTHER; note = 2'-fluoroguanosine-3'-phosphate
  modified_base 17: mod_base = OTHER; note = 2'-O-methyladenosine-3'-phosphate
  modified_base 18: mod_base = OTHER; note = 2'-O-methyladenosine-3'-phosphate
  modified_base 19: mod_base = OTHER; note = 2'-O-methyladenosine-3'-phosphate
  modified_base 20: mod_base = OTHER; note = 2'-O-methyluridine-3'-phosphate
  modified_base 21: mod_base = OTHER; note = 2'-O-methylguanosine-3'-phosphorothioate
  modified_base 22: mod_base = OTHER; note = 2'-O-methyladenosine-3'-phosphorothioate
  modified_base 23: mod_base = OTHER; note = 2'-O-methyluridine-3'-phosphate
tgtagcctagacagtgaaatgat

SEQ ID NO: 3896 - RNA, 23 nt, synthetic construct
  source 1..23: mol_type = other RNA; note = Description of Artificial Sequence: Synthetic oligonucleotide
  modified_base 1: mod_base = OTHER; note = 2'-O-methyladenosine-3'-phosphorothioate
  modified_base 2: mod_base = OTHER; note = 2'-fluoroguanosine-3'-phosphorothioate
  modified_base 3: mod_base = OTHER; note = 2'-O-methylcytidine-3'-phosphate
  modified_base 4: mod_base = OTHER; note = 2'-O-methyladenosine-3'-phosphate
  modified_base 5: mod_base = OTHER; note = 2'-O-methyluridine-3'-phosphate
  modified_base 6: mod_base = OTHER; note = 2'-fluorocytidine-3'-phosphate
  modified_base 7: mod_base = OTHER; note = 2'-O-methyladenosine-3'-phosphate
  modified_base 8: mod_base = OTHER; note = 2'-fluoroguanosine-3'-phosphate
  modified_base 9: mod_base = OTHER; note = 2'-fluoroguanosine-3'-phosphate
  modified_base 10: mod_base = OTHER; note = 2'-O-methyladenosine-3'-phosphate
  modified_base 11: mod_base = OTHER; note = 2'-O-methyluridine-3'-phosphate
  modified_base 12: mod_base = OTHER; note = 2'-O-methyladenosine-3'-phosphate
  modified_base 13: mod_base = OTHER; note = 2'-O-methyluridine-3'-phosphate
  modified_base 14: mod_base = OTHER; note = 2'-fluoroadenosine-3'-phosphate
  modified_base 15: mod_base = OTHER; note = 2'-O-methylguanosine-3'-phosphate
  modified_base 16: mod_base = OTHER; note = 2'-fluorocytidine-3'-phosphate
  modified_base 17: mod_base = OTHER; note = 2'-O-methyluridine-3'-phosphate
  modified_base 18: mod_base = OTHER; note = 2'-O-methylguanosine-3'-phosphate
  modified_base 19: mod_base = OTHER; note = 2'-O-methyluridine-3'-phosphate
  modified_base 20: mod_base = OTHER; note = 2'-O-methylguanosine-3'-phosphate
  modified_base 21: mod_base = OTHER; note = 2'-O-methylguanosine-3'-phosphorothioate
  modified_base 22: mod_base = OTHER; note = 2'-O-methyladenosine-3'-phosphorothioate
  modified_base 23: mod_base = OTHER; note = 2'-O-methyluridine-3'-phosphate
agcatcaggatatagctgtggat

SEQ ID NO: 3897 - RNA, 23 nt, synthetic construct
  source 1..23: mol_type = other RNA; note = Description of Artificial Sequence: Synthetic oligonucleotide
  modified_base 1: mod_base = OTHER; note = 2'-O-methyluridine-3'-phosphorothioate
  modified_base 2: mod_base = OTHER; note = 2'-fluoroadenosine-3'-phosphorothioate
  modified_base 3: mod_base = OTHER; note = 2'-O-methylcytidine-3'-phosphate
  modified_base 4: mod_base = OTHER; note = 2'-O-methyluridine-3'-phosphate
  modified_base 5: mod_base = OTHER; note = 2'-O-methyladenosine-3'-phosphate
  modified_base 6: mod_base = OTHER; note = 2'-fluoroguanosine-3'-phosphate
  modified_base 7: mod_base = OTHER; note = 2'-O-methylguanosine-3'-phosphate
  modified_base 8: mod_base = OTHER; note = 2'-fluorocytidine-3'-phosphate
  modified_base 9: mod_base = OTHER; note = 2'-fluoroadenosine-3'-phosphate
  modified_base 10: mod_base = OTHER; note = 2'-O-methyluridine-3'-phosphate
  modified_base 11: mod_base = OTHER; note = 2'-O-methylguanosine-3'-phosphate
  modified_base 12: mod_base = OTHER; note = 2'-O-methyluridine-3'-phosphate
  modified_base 13: mod_base = OTHER; note = 2'-O-methyluridine-3'-phosphate
  modified_base 14: mod_base = OTHER; note = 2'-fluorocytidine-3'-phosphate
  modified_base 15: mod_base = OTHER; note = 2'-O-methyladenosine-3'-phosphate
  modified_base 16: mod_base = OTHER; note = 2'-fluoroguanosine-3'-phosphate
  modified_base 17: mod_base = OTHER; note = 2'-O-methyluridine-3'-phosphate
  modified_base 18: mod_base = OTHER; note = 2'-O-methylguanosine-3'-phosphate
  modified_base 19: mod_base = OTHER; note = 2'-O-methyladenosine-3'-phosphate
  modified_base 20: mod_base = OTHER; note = 2'-O-methyladenosine-3'-phosphate
  modified_base 21: mod_base = OTHER; note = 2'-O-methylguanosine-3'-phosphorothioate
  modified_base 22: mod_base = OTHER; note = 2'-O-methylguanosine-3'-phosphorothioate
  modified_base 23: mod_base = OTHER; note = 2'-O-methyladenosine-3'-phosphate
tactaggcatgttcagtgaagga

SEQ ID NO: 3898 - RNA, 23 nt, synthetic construct
  source 1..23: mol_type = other RNA; note = Description of Artificial Sequence: Synthetic oligonucleotide
  modified_base 1: mod_base = OTHER; note = 2'-O-methyluridine-3'-phosphorothioate
  modified_base 2: mod_base = OTHER; note = 2'-fluorouridine -3'-phosphorothioate
  modified_base 3: mod_base = OTHER; note = 2'-O-methylcytidine-3'-phosphate
  modified_base 4: mod_base = OTHER; note = 2'-O-methyladenosine-3'-phosphate
  modified_base 5: mod_base = OTHER; note = 2'-O-methyluridine-3'-phosphate
  modified_base 6: mod_base = OTHER; note = 2'-fluoroadenosine-3'-phosphate
  modified_base 7: mod_base = OTHER; note = 2'-O-methyladenosine-3'-phosphate
  modified_base 8: mod_base = OTHER; note = 2'-fluoroguanosine-3'-phosphate
  modified_base 9: mod_base = OTHER; note = 2'-fluorocytidine-3'-phosphate
  modified_base 10: mod_base = OTHER; note = 2'-O-methyladenosine-3'-phosphate
  modified_base 11: mod_base = OTHER; note = 2'-O-methylcytidine-3'-phosphate
  modified_base 12: mod_base = OTHER; note = 2'-O-methyluridine-3'-phosphate
  modified_base 13: mod_base = OTHER; note = 2'-O-methylcytidine-3'-phosphate
  modified_base 14: mod_base = OTHER; note = 2'-fluorouridine-3'-phosphate
  modified_base 15: mod_base = OTHER; note = 2'-O-methylcytidine-3'-phosphate
  modified_base 16: mod_base = OTHER; note = 2'-fluoroadenosine-3'-phosphate
  modified_base 17: mod_base = OTHER; note = 2'-O-methyladenosine-3'-phosphate
  modified_base 18: mod_base = OTHER; note = 2'-O-methylcytidine-3'-phosphate
  modified_base 19: mod_base = OTHER; note = 2'-O-methylcytidine-3'-phosphate
  modified_base 20: mod_base = OTHER; note = 2'-O-methyladenosine-3'-phosphate
  modified_base 21: mod_base = OTHER; note = 2'-O-methylcytidine-3'-phosphorothioate
  modified_base 22: mod_base = OTHER; note = 2'-O-methylcytidine-3'-phosphorothioate
  modified_base 23: mod_base = OTHER; note = 2'-O-methyluridine-3'-phosphate
ttcataagcactctcaaccacct

SEQ ID NO: 3899 - RNA, 23 nt, synthetic construct
  source 1..23: mol_type = other RNA; note = Description of Artificial Sequence: Synthetic oligonucleotide
  modified_base 1: mod_base = OTHER; note = 2'-O-methyluridine-3'-phosphorothioate
  modified_base 2: mod_base = OTHER; note = 2'-fluoroguanosine-3'-phosphorothioate
  modified_base 3: mod_base = OTHER; note = 2'-O-methyluridine-3'-phosphate
  modified_base 4: mod_base = OTHER; note = 2'-O-methyladenosine-3'-phosphate
  modified_base 5: mod_base = OTHER; note = 2'-O-methyladenosine-3'-phosphate
  modified_base 6: mod_base = OTHER; note = 2'-fluorouridine-3'-phosphate
  modified_base 7: mod_base = OTHER; note = 2'-O-methylguanosine-3'-phosphate
  modified_base 8: mod_base = OTHER; note = 2'-fluorouridine-3'-phosphate
  modified_base 9: mod_base = OTHER; note = 2'-fluoroadenosine-3'-phosphate
  modified_base 10: mod_base = OTHER; note = 2'-O-methylcytidine-3'-phosphate
  modified_base 11: mod_base = OTHER; note = 2'-O-methyladenosine-3'-phosphate
  modified_base 12: mod_base = OTHER; note = 2'-O-methylcytidine-3'-phosphate
  modified_base 13: mod_base = OTHER; note = 2'-O-methyluridine-3'-phosphate
  modified_base 14: mod_base = OTHER; note = 2'-fluoroadenosine-3'-phosphate
  modified_base 15: mod_base = OTHER; note = 2'-O-methylcytidine-3'-phosphate
  modified_base 16: mod_base = OTHER; note = 2'-fluorouridine-3'-phosphate
  modified_base 17: mod_base = OTHER; note = 2'-O-methylguanosine-3'-phosphate
  modified_base 18: mod_base = OTHER; note = 2'-O-methyladenosine-3'-phosphate
  modified_base 19: mod_base = OTHER; note = 2'-O-methyluridine-3'-phosphate
  modified_base 20: mod_base = OTHER; note = 2'-O-methyladenosine-3'-phosphate
  modified_base 21: mod_base = OTHER; note = 2'-O-methyluridine-3'-phosphorothioate
  modified_base 22: mod_base = OTHER; note = 2'-O-methyladenosine-3'-phosphorothioate
  modified_base 23: mod_base = OTHER; note = 2'-O-methylguanosine-3'-phosphate
tgtaatgtacactactgatatag

SEQ ID NO: 3900 - RNA, 23 nt, synthetic construct
  source 1..23: mol_type = other RNA; note = Description of Artificial Sequence: Synthetic oligonucleotide
  modified_base 1: mod_base = OTHER; note = 2'-O-methyluridine-3'-phosphorothioate
  modified_base 2: mod_base = OTHER; note = 2'-fluoroadenosine-3'-phosphorothioate
  modified_base 3: mod_base = OTHER; note = 2'-O-methyladenosine-3'-phosphate
  modified_base 4: mod_base = OTHER; note = 2'-O-methylcytidine-3'-phosphate
  modified_base 5: mod_base = OTHER; note = 2'-O-methyladenosine-3'-phosphate
  modified_base 6: mod_base = OTHER; note = 2'-fluorocytidine-3'-phosphate
  modified_base 7: mod_base = OTHER; note = 2'-O-methyluridine-3'-phosphate
  modified_base 8: mod_base = OTHER; note = 2'-fluorouridine-3'-phosphate
  modified_base 9: mod_base = OTHER; note = 2'-fluoroguanosine-3'-phosphate
  modified_base 10: mod_base = OTHER; note = 2'-O-methylguanosine-3'-phosphate
  modified_base 11: mod_base = OTHER; note = 2'-O-methyladenosine-3'-phosphate
  modified_base 12: mod_base = OTHER; note = 2'-O-methyluridine-3'-phosphate
  modified_base 13: mod_base = OTHER; note = 2'-O-methyladenosine-3'-phosphate
  modified_base 14: mod_base = OTHER; note = 2'-fluoroguanosine-3'-phosphate
  modified_base 15: mod_base = OTHER; note = 2'-O-methyluridine-3'-phosphate
  modified_base 16: mod_base = OTHER; note = 2'-fluorouridine-3'-phosphate
  modified_base 17: mod_base = OTHER; note = 2'-O-methylguanosine-3'-phosphate
  modified_base 18: mod_base = OTHER; note = 2'-O-methylguanosine-3'-phosphate
  modified_base 19: mod_base = OTHER; note = 2'-O-methyluridine-3'-phosphate
  modified_base 20: mod_base = OTHER; note = 2'-O-methyluridine-3'-phosphate
  modified_base 21: mod_base = OTHER; note = 2'-O-methylguanosine-3'-phosphorothioate
  modified_base 22: mod_base = OTHER; note = 2'-O-methylcytidine-3'-phosphorothioate
  modified_base 23: mod_base = OTHER; note = 2'-O-methyladenosine-3'-phosphate
taacacttggatagttggttgca

SEQ ID NO: 3901 - RNA, 23 nt, synthetic construct
  source 1..23: mol_type = other RNA; note = Description of Artificial Sequence: Synthetic oligonucleotide
  modified_base 1: mod_base = OTHER; note = 2'-O-methyluridine-3'-phosphorothioate
  modified_base 2: mod_base = OTHER; note = 2'-fluoroadenosine-3'-phosphorothioate
  modified_base 3: mod_base = OTHER; note = 2'-O-methyluridine-3'-phosphate
  modified_base 4: mod_base = OTHER; note = 2'-O-methyladenosine-3'-phosphate
  modified_base 5: mod_base = OTHER; note = 2'-O-methylcytidine-3'-phosphate
  modified_base 6: mod_base = OTHER; note = 2'-fluorouridine-3'-phosphate
  modified_base 7: mod_base = OTHER; note = 2'-O-methylcytidine-3'-phosphate
  modified_base 8: mod_base = OTHER; note = 2'-fluorouridine-3'-phosphate
  modified_base 9: mod_base = OTHER; note = 2'-fluorocytidine-3'-phosphate
  modified_base 10: mod_base = OTHER; note = 2'-O-methyluridine-3'-phosphate
  modified_base 11: mod_base = OTHER; note = 2'-O-methylguanosine-3'-phosphate
  modified_base 12: mod_base = OTHER; note = 2'-O-methylcytidine-3'-phosphate
  modified_base 13: mod_base = OTHER; note = 2'-O-methylcytidine-3'-phosphate
  modified_base 14: mod_base = OTHER; note = 2'-fluoroadenosine-3'-phosphate
  modified_base 15: mod_base = OTHER; note = 2'-O-methyladenosine-3'-phosphate
  modified_base 16: mod_base = OTHER; note = 2'-fluoroadenosine-3'-phosphate
  modified_base 17: mod_base = OTHER; note = 2'-O-methyluridine-3'-phosphate
  modified_base 18: mod_base = OTHER; note = 2'-O-methylcytidine-3'-phosphate
  modified_base 19: mod_base = OTHER; note = 2'-O-methyluridine-3'-phosphate
  modified_base 20: mod_base = OTHER; note = 2'-O-methylguanosine-3'-phosphate
  modified_base 21: mod_base = OTHER; note = 2'-O-methylcytidine-3'-phosphorothioate
  modified_base 22: mod_base = OTHER; note = 2'-O-methyluridine-3'-phosphorothioate
  modified_base 23: mod_base = OTHER; note = 2'-O-methyladenosine-3'-phosphate
tatactctctgccaaatctgcta

SEQ ID NO: 3902 - RNA, 23 nt, synthetic construct
  source 1..23: mol_type = other RNA; note = Description of Artificial Sequence: Synthetic oligonucleotide
  modified_base 1: mod_base = OTHER; note = 2'-O-methyluridine-3'-phosphorothioate
  modified_base 2: mod_base = OTHER; note = 2'-fluoroadenosine-3'-phosphorothioate
  modified_base 3: mod_base = OTHER; note = 2'-O-methylguanosine-3'-phosphate
  modified_base 4: mod_base = OTHER; note = 2'-O-methylguanosine-3'-phosphate
  modified_base 5: mod_base = OTHER; note = 2'-O-methylcytidine-3'-phosphate
  modified_base 6: mod_base = OTHER; note = 2'-fluoroadenosine-3'-phosphate
  modified_base 7: mod_base = OTHER; note = 2'-O-methyluridine-3'-phosphate
  modified_base 8: mod_base = OTHER; note = 2'-fluoroguanosine-3'-phosphate
  modified_base 9: mod_base = OTHER; note = 2'-fluorouridine-3'-phosphate
  modified_base 10: mod_base = OTHER; note = 2'-O-methyluridine-3'-phosphate
  modified_base 11: mod_base = OTHER; note = 2'-O-methylcytidine-3'-phosphate
  modified_base 12: mod_base = OTHER; note = 2'-O-methyladenosine-3'-phosphate
  modified_base 13: mod_base = OTHER; note = 2'-O-methylguanosine-3'-phosphate
  modified_base 14: mod_base = OTHER; note = 2'-fluorouridine-3'-phosphate
  modified_base 15: mod_base = OTHER; note = 2'-O-methylguanosine-3'-phosphate
  modified_base 16: mod_base = OTHER; note = 2'-fluoroadenosine-3'-phosphate
  modified_base 17: mod_base = OTHER; note = 2'-O-methyladenosine-3'-phosphate
  modified_base 18: mod_base = OTHER; note = 2'-O-methylguanosine-3'-phosphate
  modified_base 19: mod_base = OTHER; note = 2'-O-methylguanosine-3'-phosphate
  modified_base 20: mod_base = OTHER; note = 2'-O-methyladenosine-3'-phosphate
  modified_base 21: mod_base = OTHER; note = 2'-O-methylguanosine-3'-phosphorothioate
  modified_base 22: mod_base = OTHER; note = 2'-O-methylcytidine-3'-phosphorothioate
  modified_base 23: mod_base = OTHER; note = 2'-O-methylcytidine-3'-phosphate
taggcatgttcagtgaaggagcc

SEQ ID NO: 3903 - RNA, 23 nt, synthetic construct
  source 1..23: mol_type = other RNA; note = Description of Artificial Sequence: Synthetic oligonucleotide
  modified_base 1: mod_base = OTHER; note = 2'-O-methyladenosine-3'-phosphorothioate
  modified_base 2: mod_base = OTHER; note = 2'-fluoroadenosine-3'-phosphorothioate
  modified_base 3: mod_base = OTHER; note = 2'-O-methyladenosine-3'-phosphate
  modified_base 4: mod_base = OTHER; note = 2'-O-methyladenosine-3'-phosphate
  modified_base 5: mod_base = OTHER; note = 2'-O-methyladenosine-3'-phosphate
  modified_base 6: mod_base = OTHER; note = 2'-fluorouridine-3'-phosphate
  modified_base 7: mod_base = OTHER; note = 2'-O-methylguanosine-3'-phosphate
  modified_base 8: mod_base = OTHER; note = 2'-fluorouridine-3'-phosphate
  modified_base 9: mod_base = OTHER; note = 2'-fluorouridine-3'-phosphate
  modified_base 10: mod_base = OTHER; note = 2'-O-methylguanosine-3'-phosphate
  modified_base 11: mod_base = OTHER; note = 2'-O-methylguanosine-3'-phosphate
  modified_base 12: mod_base = OTHER; note = 2'-O-methyladenosine-3'-phosphate
  modified_base 13: mod_base = OTHER; note = 2'-O-methylcytidine-3'-phosphate
  modified_base 14: mod_base = OTHER; note = 2'-fluorouridine-3'-phosphate
  modified_base 15: mod_base = OTHER; note = 2'-O-methyladenosine-3'-phosphate
  modified_base 16: mod_base = OTHER; note = 2'-fluoroguanosine-3'-phosphate
  modified_base 17: mod_base = OTHER; note = 2'-O-methylguanosine-3'-phosphate
  modified_base 18: mod_base = OTHER; note = 2'-O-methylcytidine-3'-phosphate
  modified_base 19: mod_base = OTHER; note = 2'-O-methyladenosine-3'-phosphate
  modified_base 20: mod_base = OTHER; note = 2'-O-methyluridine-3'-phosphate
  modified_base 21: mod_base = OTHER; note = 2'-O-methylguanosine-3'-phosphorothioate
  modified_base 22: mod_base = OTHER; note = 2'-O-methyluridine-3'-phosphorothioate
  modified_base 23: mod_base = OTHER; note = 2'-O-methyluridine-3'-phosphate
aaaaatgttggactaggcatgtt

SEQ ID NO: 3904 - RNA, 23 nt, synthetic construct
  source 1..23: mol_type = other RNA; note = Description of Artificial Sequence: Synthetic oligonucleotide
  modified_base 1: mod_base = OTHER; note = 2'-O-methyluridine-3'-phosphorothioate
  modified_base 2: mod_base = OTHER; note = 2'-fluorouridine -3'-phosphorothioate
  modified_base 3: mod_base = OTHER; note = 2'-O-methylcytidine-3'-phosphate
  modified_base 4: mod_base = OTHER; note = 2'-O-methyladenosine-3'-phosphate
  modified_base 5: mod_base = OTHER; note = 2'-O-methyluridine-3'-phosphate
  modified_base 6: mod_base = OTHER; note = 2'-fluorouridine-3'-phosphate
  modified_base 7: mod_base = OTHER; note = 2'-O-methyladenosine-3'-phosphate
  modified_base 8: mod_base = OTHER; note = 2'-fluoroadenosine-3'-phosphate
  modified_base 9: mod_base = OTHER; note = 2'-fluoroguanosine-3'-phosphate
  modified_base 10: mod_base = OTHER; note = 2'-O-methyladenosine-3'-phosphate
  modified_base 11: mod_base = OTHER; note = 2'-O-methyluridine-3'-phosphate
  modified_base 12: mod_base = OTHER; note = 2'-O-methyladenosine-3'-phosphate
  modified_base 13: mod_base = OTHER; note = 2'-O-methylcytidine-3'-phosphate
  modified_base 14: mod_base = OTHER; note = 2'-fluorouridine-3'-phosphate
  modified_base 15: mod_base = OTHER; note = 2'-O-methylguanosine-3'-phosphate
  modified_base 16: mod_base = OTHER; note = 2'-fluoroadenosine-3'-phosphate
  modified_base 17: mod_base = OTHER; note = 2'-O-methyluridine-3'-phosphate
  modified_base 18: mod_base = OTHER; note = 2'-O-methylguanosine-3'-phosphate
  modified_base 19: mod_base = OTHER; note = 2'-O-methylguanosine-3'-phosphate
  modified_base 20: mod_base = OTHER; note = 2'-O-methylcytidine-3'-phosphate
  modified_base 21: mod_base = OTHER; note = 2'-O-methyladenosine-3'-phosphorothioate
  modified_base 22: mod_base = OTHER; note = 2'-O-methylcytidine-3'-phosphorothioate
  modified_base 23: mod_base = OTHER; note = 2'-O-methyladenosine-3'-phosphate
ttcattaagatactgatggcaca

SEQ ID NO: 3905 - RNA, 23 nt, synthetic construct
  source 1..23: mol_type = other RNA; note = Description of Artificial Sequence: Synthetic oligonucleotide
  modified_base 1: mod_base = OTHER; note = 2'-O-methyluridine-3'-phosphorothioate
  modified_base 2: mod_base = OTHER; note = 2'-fluorouridine -3'-phosphorothioate
  modified_base 3: mod_base = OTHER; note = 2'-O-methyluridine-3'-phosphate
  modified_base 4: mod_base = OTHER; note = 2'-O-methylcytidine-3'-phosphate
  modified_base 5: mod_base = OTHER; note = 2'-O-methyladenosine-3'-phosphate
  modified_base 6: mod_base = OTHER; note = 2'-fluorouridine-3'-phosphate
  modified_base 7: mod_base = OTHER; note = 2'-O-methyluridine-3'-phosphate
  modified_base 8: mod_base = OTHER; note = 2'-fluoroadenosine-3'-phosphate
  modified_base 9: mod_base = OTHER; note = 2'-fluoroadenosine-3'-phosphate
  modified_base 10: mod_base = OTHER; note = 2'-O-methylguanosine-3'-phosphate
  modified_base 11: mod_base = OTHER; note = 2'-O-methyladenosine-3'-phosphate
  modified_base 12: mod_base = OTHER; note = 2'-O-methyluridine-3'-phosphate
  modified_base 13: mod_base = OTHER; note = 2'-O-methyladenosine-3'-phosphate
  modified_base 14: mod_base = OTHER; note = 2'-fluorocytidine-3'-phosphate
  modified_base 15: mod_base = OTHER; note = 2'-O-methyluridine-3'-phosphate
  modified_base 16: mod_base = OTHER; note = 2'-fluoroguanosine-3'-phosphate
  modified_base 17: mod_base = OTHER; note = 2'-O-methyladenosine-3'-phosphate
  modified_base 18: mod_base = OTHER; note = 2'-O-methyluridine-3'-phosphate
  modified_base 19: mod_base = OTHER; note = 2'-O-methylguanosine-3'-phosphate
  modified_base 20: mod_base = OTHER; note = 2'-O-methylguanosine-3'-phosphate
  modified_base 21: mod_base = OTHER; note = 2'-O-methylcytidine-3'-phosphorothioate
  modified_base 22: mod_base = OTHER; note = 2'-O-methyladenosine-3'-phosphorothioate
  modified_base 23: mod_base = OTHER; note = 2'-O-methylcytidine-3'-phosphate
tttcattaagatactgatggcac

SEQ ID NO: 3906 - RNA, 23 nt, synthetic construct
  source 1..23: mol_type = other RNA; note = Description of Artificial Sequence: Synthetic oligonucleotide
  modified_base 1: mod_base = OTHER; note = 2'-O-methyladenosine-3'-phosphorothioate
  modified_base 2: mod_base = OTHER; note = 2'-fluoroguanosine-3'-phosphorothioate
  modified_base 3: mod_base = OTHER; note = 2'-O-methyladenosine-3'-phosphate
  modified_base 4: mod_base = OTHER; note = 2'-O-methylcytidine-3'-phosphate
  modified_base 5: mod_base = OTHER; note = 2'-O-methyladenosine-3'-phosphate
  modified_base 6: mod_base = OTHER; note = 2'-fluoroadenosine-3'-phosphate
  modified_base 7: mod_base = OTHER; note = 2'-O-methyluridine-3'-phosphate
  modified_base 8: mod_base = OTHER; note = 2'-fluorocytidine-3'-phosphate
  modified_base 9: mod_base = OTHER; note = 2'-fluorouridine-3'-phosphate
  modified_base 10: mod_base = OTHER; note = 2'-O-methyluridine-3'-phosphate
  modified_base 11: mod_base = OTHER; note = 2'-O-methyluridine-3'-phosphate
  modified_base 12: mod_base = OTHER; note = 2'-O-methylguanosine-3'-phosphate
  modified_base 13: mod_base = OTHER; note = 2'-O-methylguanosine-3'-phosphate
  modified_base 14: mod_base = OTHER; note = 2'-fluorouridine-3'-phosphate
  modified_base 15: mod_base = OTHER; note = 2'-O-methylguanosine-3'-phosphate
  modified_base 16: mod_base = OTHER; note = 2'-fluorouridine-3'-phosphate
  modified_base 17: mod_base = OTHER; note = 2'-O-methyluridine-3'-phosphate
  modified_base 18: mod_base = OTHER; note = 2'-O-methylcytidine-3'-phosphate
  modified_base 19: mod_base = OTHER; note = 2'-O-methyluridine-3'-phosphate
  modified_base 20: mod_base = OTHER; note = 2'-O-methyladenosine-3'-phosphate
  modified_base 21: mod_base = OTHER; note = 2'-O-methyladenosine-3'-phosphorothioate
  modified_base 22: mod_base = OTHER; note = 2'-O-methylguanosine-3'-phosphorothioate
  modified_base 23: mod_base = OTHER; note = 2'-O-methylguanosine-3'-phosphate
agacaatctttggtgttctaagg

SEQ ID NO: 3907 - RNA, 23 nt, synthetic construct
  source 1..23: mol_type = other RNA; note = Description of Artificial Sequence: Synthetic oligonucleotide
  modified_base 1: mod_base = OTHER; note = 2'-O-methyluridine-3'-phosphorothioate
  modified_base 2: mod_base = OTHER; note = 2'-fluoroadenosine-3'-phosphorothioate
  modified_base 3: mod_base = OTHER; note = 2'-O-methylguanosine-3'-phosphate
  modified_base 4: mod_base = OTHER; note = 2'-O-methylcytidine-3'-phosphate
  modified_base 5: mod_base = OTHER; note = 2'-O-methylcytidine-3'-phosphate
  modified_base 6: mod_base = OTHER; note = 2'-fluorouridine-3'-phosphate
  modified_base 7: mod_base = OTHER; note = 2'-O-methyladenosine-3'-phosphate
  modified_base 8: mod_base = OTHER; note = 2'-fluoroguanosine-3'-phosphate
  modified_base 9: mod_base = OTHER; note = 2'-fluoroadenosine-3'-phosphate
  modified_base 10: mod_base = OTHER; note = 2'-O-methylcytidine-3'-phosphate
  modified_base 11: mod_base = OTHER; note = 2'-O-methyladenosine-3'-phosphate
  modified_base 12: mod_base = OTHER; note = 2'-O-methylguanosine-3'-phosphate
  modified_base 13: mod_base = OTHER; note = 2'-O-methyluridine-3'-phosphate
  modified_base 14: mod_base = OTHER; note = 2'-fluoroguanosine-3'-phosphate
  modified_base 15: mod_base = OTHER; note = 2'-O-methyladenosine-3'-phosphate
  modified_base 16: mod_base = OTHER; note = 2'-fluoroadenosine-3'-phosphate
  modified_base 17: mod_base = OTHER; note = 2'-O-methyladenosine-3'-phosphate
  modified_base 18: mod_base = OTHER; note = 2'-O-methyluridine-3'-phosphate
  modified_base 19: mod_base = OTHER; note = 2'-O-methylguanosine-3'-phosphate
  modified_base 20: mod_base = OTHER; note = 2'-O-methyladenosine-3'-phosphate
  modified_base 21: mod_base = OTHER; note = 2'-O-methyluridine-3'-phosphorothioate
  modified_base 22: mod_base = OTHER; note = 2'-O-methyladenosine-3'-phosphorothioate
  modified_base 23: mod_base = OTHER; note = 2'-O-methyluridine-3'-phosphate
tagcctagacagtgaaatgatat

SEQ ID NO: 3908 - RNA, 23 nt, synthetic construct
  source 1..23: mol_type = other RNA; note = Description of Artificial Sequence: Synthetic oligonucleotide
  modified_base 1: mod_base = OTHER; note = 2'-O-methyluridine-3'-phosphorothioate
  modified_base 2: mod_base = OTHER; note = 2'-fluorouridine -3'-phosphorothioate
  modified_base 3: mod_base = OTHER; note = 2'-O-methylguanosine-3'-phosphate
  modified_base 4: mod_base = OTHER; note = 2'-O-methyluridine-3'-phosphate
  modified_base 5: mod_base = OTHER; note = 2'-O-methyluridine-3'-phosphate
  modified_base 6: mod_base = OTHER; note = 2'-fluoroguanosine-3'-phosphate
  modified_base 7: mod_base = OTHER; note = 2'-O-methyluridine-3'-phosphate
  modified_base 8: mod_base = OTHER; note = 2'-fluoroadenosine-3'-phosphate
  modified_base 9: mod_base = OTHER; note = 2'-fluoroguanosine-3'-phosphate
  modified_base 10: mod_base = OTHER; note = 2'-O-methylcytidine-3'-phosphate
  modified_base 11: mod_base = OTHER; note = 2'-O-methylcytidine-3'-phosphate
  modified_base 12: mod_base = OTHER; note = 2'-O-methyluridine-3'-phosphate
  modified_base 13: mod_base = OTHER; note = 2'-O-methyladenosine-3'-phosphate
  modified_base 14: mod_base = OTHER; note = 2'-fluoroguanosine-3'-phosphate
  modified_base 15: mod_base = OTHER; note = 2'-O-methyladenosine-3'-phosphate
  modified_base 16: mod_base = OTHER; note = 2'-fluorocytidine-3'-phosphate
  modified_base 17: mod_base = OTHER; note = 2'-O-methyladenosine-3'-phosphate
  modified_base 18: mod_base = OTHER; note = 2'-O-methylguanosine-3'-phosphate
  modified_base 19: mod_base = OTHER; note = 2'-O-methyluridine-3'-phosphate
  modified_base 20: mod_base = OTHER; note = 2'-O-methylguanosine-3'-phosphate
  modified_base 21: mod_base = OTHER; note = 2'-O-methyladenosine-3'-phosphorothioate
  modified_base 22: mod_base = OTHER; note = 2'-O-methyladenosine-3'-phosphorothioate
  modified_base 23: mod_base = OTHER; note = 2'-O-methyladenosine-3'-phosphate
ttgttgtagcctagacagtgaaa

SEQ ID NO: 3909 - RNA, 23 nt, synthetic construct
  source 1..23: mol_type = other RNA; note = Description of Artificial Sequence: Synthetic oligonucleotide
  modified_base 1: mod_base = OTHER; note = 2'-O-methyluridine-3'-phosphorothioate
  modified_base 2: mod_base = OTHER; note = 2'-fluoroguanosine-3'-phosphorothioate
  modified_base 3: mod_base = OTHER; note = 2'-O-methyluridine-3'-phosphate
  modified_base 4: mod_base = OTHER; note = 2'-O-methyladenosine-3'-phosphate
  modified_base 5: mod_base = OTHER; note = 2'-O-methyluridine-3'-phosphate
  modified_base 6: mod_base = OTHER; note = 2'-fluoroadenosine-3'-phosphate
  modified_base 7: mod_base = OTHER; note = 2'-O-methyladenosine-3'-phosphate
  modified_base 8: mod_base = OTHER; note = 2'-fluorocytidine-3'-phosphate
  modified_base 9: mod_base = OTHER; note = 2'-fluoroadenosine-3'-phosphate
  modified_base 10: mod_base = OTHER; note = 2'-O-methylcytidine-3'-phosphate
  modified_base 11: mod_base = OTHER; note = 2'-O-methyluridine-3'-phosphate
  modified_base 12: mod_base = OTHER; note = 2'-O-methyluridine-3'-phosphate
  modified_base 13: mod_base = OTHER; note = 2'-O-methylguanosine-3'-phosphate
  modified_base 14: mod_base = OTHER; note = 2'-fluoroguanosine-3'-phosphate
  modified_base 15: mod_base = OTHER; note = 2'-O-methyladenosine-3'-phosphate
  modified_base 16: mod_base = OTHER; note = 2'-fluorouridine-3'-phosphate
  modified_base 17: mod_base = OTHER; note = 2'-O-methyladenosine-3'-phosphate
  modified_base 18: mod_base = OTHER; note = 2'-O-methylguanosine-3'-phosphate
  modified_base 19: mod_base = OTHER; note = 2'-O-methyluridine-3'-phosphate
  modified_base 20: mod_base = OTHER; note = 2'-O-methyluridine-3'-phosphate
  modified_base 21: mod_base = OTHER; note = 2'-O-methylguanosine-3'-phosphorothioate
  modified_base 22: mod_base = OTHER; note = 2'-O-methylguanosine-3'-phosphorothioate
  modified_base 23: mod_base = OTHER; note = 2'-O-methyluridine-3'-phosphate
tgtataacacttggatagttggt

SEQ ID NO: 3910 - RNA, 23 nt, synthetic construct
  source 1..23: mol_type = other RNA; note = Description of Artificial Sequence: Synthetic oligonucleotide
  modified_base 1: mod_base = OTHER; note = 2'-O-methyluridine-3'-phosphorothioate
  modified_base 2: mod_base = OTHER; note = 2'-fluorocytidine-3'-phosphorothioate
  modified_base 3: mod_base = OTHER; note = 2'-O-methyladenosine-3'-phosphate
  modified_base 4: mod_base = OTHER; note = 2'-O-methyluridine-3'-phosphate
  modified_base 5: mod_base = OTHER; note = 2'-O-methyladenosine-3'-phosphate
  modified_base 6: mod_base = OTHER; note = 2'-fluorouridine-3'-phosphate
  modified_base 7: mod_base = OTHER; note = 2'-O-methyluridine-3'-phosphate
  modified_base 8: mod_base = OTHER; note = 2'-fluoroguanosine-3'-phosphate
  modified_base 9: mod_base = OTHER; note = 2'-fluoroguanosine-3'-phosphate
  modified_base 10: mod_base = OTHER; note = 2'-O-methyladenosine-3'-phosphate
  modified_base 11: mod_base = OTHER; note = 2'-O-methylcytidine-3'-phosphate
  modified_base 12: mod_base = OTHER; note = 2'-O-methyluridine-3'-phosphate
  modified_base 13: mod_base = OTHER; note = 2'-O-methyluridine-3'-phosphate
  modified_base 14: mod_base = OTHER; note = 2'-fluoroguanosine-3'-phosphate
  modified_base 15: mod_base = OTHER; note = 2'-O-methylguanosine-3'-phosphate
  modified_base 16: mod_base = OTHER; note = 2'-fluoroadenosine-3'-phosphate
  modified_base 17: mod_base = OTHER; note = 2'-O-methyladenosine-3'-phosphate
  modified_base 18: mod_base = OTHER; note = 2'-O-methylcytidine-3'-phosphate
  modified_base 19: mod_base = OTHER; note = 2'-O-methylcytidine-3'-phosphate
  modified_base 20: mod_base = OTHER; note = 2'-O-methyladenosine-3'-phosphate
  modified_base 21: mod_base = OTHER; note = 2'-O-methyladenosine-3'-phosphorothioate
  modified_base 22: mod_base = OTHER; note = 2'-O-methyladenosine-3'-phosphorothioate
  modified_base 23: mod_base = OTHER; note = 2'-O-methyladenosine-3'-phosphate
tcatattggacttggaaccaaaa

SEQ ID NO: 3911 - RNA, 23 nt, synthetic construct
  source 1..23: mol_type = other RNA; note = Description of Artificial Sequence: Synthetic oligonucleotide
  modified_base 1: mod_base = OTHER; note = 2'-O-methyladenosine-3'-phosphorothioate
  modified_base 2: mod_base = OTHER; note = 2'-fluoroguanosine-3'-phosphorothioate
  modified_base 3: mod_base = OTHER; note = 2'-O-methyluridine-3'-phosphate
  modified_base 4: mod_base = OTHER; note = 2'-O-methyluridine-3'-phosphate
  modified_base 5: mod_base = OTHER; note = 2'-O-methyluridine-3'-phosphate
  modified_base 6: mod_base = OTHER; note = 2'-fluoroguanosine-3'-phosphate
  modified_base 7: mod_base = OTHER; note = 2'-O-methyladenosine-3'-phosphate
  modified_base 8: mod_base = OTHER; note = 2'-fluorouridine-3'-phosphate
  modified_base 9: mod_base = OTHER; note = 2'-fluorocytidine-3'-phosphate
  modified_base 10: mod_base = OTHER; note = 2'-O-methyladenosine-3'-phosphate
  modified_base 11: mod_base = OTHER; note = 2'-O-methylcytidine-3'-phosphate
  modified_base 12: mod_base = OTHER; note = 2'-O-methylcytidine-3'-phosphate
  modified_base 13: mod_base = OTHER; note = 2'-O-methyluridine-3'-phosphate
  modified_base 14: mod_base = OTHER; note = 2'-fluorocytidine-3'-phosphate
  modified_base 15: mod_base = OTHER; note = 2'-O-methyladenosine-3'-phosphate
  modified_base 16: mod_base = OTHER; note = 2'-fluorouridine-3'-phosphate
  modified_base 17: mod_base = OTHER; note = 2'-O-methyladenosine-3'-phosphate
  modified_base 18: mod_base = OTHER; note = 2'-O-methyladenosine-3'-phosphate
  modified_base 19: mod_base = OTHER; note = 2'-O-methylguanosine-3'-phosphate
  modified_base 20: mod_base = OTHER; note = 2'-O-methylcytidine-3'-phosphate
  modified_base 21: mod_base = OTHER; note = 2'-O-methyladenosine-3'-phosphorothioate
  modified_base 22: mod_base = OTHER; note = 2'-O-methylcytidine-3'-phosphorothioate
  modified_base 23: mod_base = OTHER; note = 2'-O-methyluridine-3'-phosphate
agtttgatcacctcataagcact

SEQ ID NO: 3912 - RNA, 23 nt, synthetic construct
  source 1..23: mol_type = other RNA; note = Description of Artificial Sequence: Synthetic oligonucleotide
  modified_base 1: mod_base = OTHER; note = 2'-O-methyluridine-3'-phosphorothioate
  modified_base 2: mod_base = OTHER; note = 2'-fluorocytidine-3'-phosphorothioate
  modified_base 3: mod_base = OTHER; note = 2'-O-methyladenosine-3'-phosphate
  modified_base 4: mod_base = OTHER; note = 2'-O-methylcytidine-3'-phosphate
  modified_base 5: mod_base = OTHER; note = 2'-O-methylcytidine-3'-phosphate
  modified_base 6: mod_base = OTHER; note = 2'-fluorouridine-3'-phosphate
  modified_base 7: mod_base = OTHER; note = 2'-O-methyluridine-3'-phosphate
  modified_base 8: mod_base = OTHER; note = 2'-fluorocytidine-3'-phosphate
  modified_base 9: mod_base = OTHER; note = 2'-fluoroadenosine-3'-phosphate
  modified_base 10: mod_base = OTHER; note = 2'-O-methylcytidine-3'-phosphate
  modified_base 11: mod_base = OTHER; note = 2'-O-methyladenosine-3'-phosphate
  modified_base 12: mod_base = OTHER; note = 2'-O-methyladenosine-3'-phosphate
  modified_base 13: mod_base = OTHER; note = 2'-O-methylguanosine-3'-phosphate
  modified_base 14: mod_base = OTHER; note = 2'-fluoroguanosine-3'-phosphate
  modified_base 15: mod_base = OTHER; note = 2'-O-methyluridine-3'-phosphate
  modified_base 16: mod_base = OTHER; note = 2'-fluorocytidine-3'-phosphate
  modified_base 17: mod_base = OTHER; note = 2'-O-methyluridine-3'-phosphate
  modified_base 18: mod_base = OTHER; note = 2'-O-methylguanosine-3'-phosphate
  modified_base 19: mod_base = OTHER; note = 2'-O-methyladenosine-3'-phosphate
  modified_base 20: mod_base = OTHER; note = 2'-O-methylguanosine-3'-phosphate
  modified_base 21: mod_base = OTHER; note = 2'-O-methyladenosine-3'-phosphorothioate
  modified_base 22: mod_base = OTHER; note = 2'-O-methyluridine-3'-phosphorothioate
  modified_base 23: mod_base = OTHER; note = 2'-O-methyluridine-3'-phosphate
tcaccttcacaaggtctgagatt

SEQ ID NO: 3913 - RNA, 23 nt, synthetic construct
  source 1..23: mol_type = other RNA; note = Description of Artificial Sequence: Synthetic oligonucleotide
  modified_base 1: mod_base = OTHER; note = 2'-O-methyladenosine-3'-phosphorothioate
  modified_base 2: mod_base = OTHER; note = 2'-fluoroguanosine-3'-phosphorothioate
  modified_base 3: mod_base = OTHER; note = 2'-O-methylguanosine-3'-phosphate
  modified_base 4: mod_base = OTHER; note = 2'-O-methyladenosine-3'-phosphate
  modified_base 5: mod_base = OTHER; note = 2'-O-methyluridine-3'-phosphate
  modified_base 6: mod_base = OTHER; note = 2'-fluoroadenosine-3'-phosphate
  modified_base 7: mod_base = OTHER; note = 2'-O-methyluridine-3'-phosphate
  modified_base 8: mod_base = OTHER; note = 2'-fluoroadenosine-3'-phosphate
  modified_base 9: mod_base = OTHER; note = 2'-fluoroguanosine-3'-phosphate
  modified_base 10: mod_base = OTHER; note = 2'-O-methylcytidine-3'-phosphate
  modified_base 11: mod_base = OTHER; note = 2'-O-methyluridine-3'-phosphate
  modified_base 12: mod_base = OTHER; note = 2'-O-methylguanosine-3'-phosphate
  modified_base 13: mod_base = OTHER; note = 2'-O-methyluridine-3'-phosphate
  modified_base 14: mod_base = OTHER; note = 2'-fluoroguanosine-3'-phosphate
  modified_base 15: mod_base = OTHER; note = 2'-O-methylguanosine-3'-phosphate
  modified_base 16: mod_base = OTHER; note = 2'-fluoroadenosine-3'-phosphate
  modified_base 17: mod_base = OTHER; note = 2'-O-methyluridine-3'-phosphate
  modified_base 18: mod_base = OTHER; note = 2'-O-methyluridine-3'-phosphate
  modified_base 19: mod_base = OTHER; note = 2'-O-methyluridine-3'-phosphate
  modified_base 20: mod_base = OTHER; note = 2'-O-methyluridine-3'-phosphate
  modified_base 21: mod_base = OTHER; note = 2'-O-methyladenosine-3'-phosphorothioate
  modified_base 22: mod_base = OTHER; note = 2'-O-methylcytidine-3'-phosphorothioate
  modified_base 23: mod_base = OTHER; note = 2'-O-methyladenosine-3'-phosphate
aggatatagctgtggattttaca

SEQ ID NO: 3914 - RNA, 23 nt, synthetic construct
  source 1..23: mol_type = other RNA; note = Description of Artificial Sequence: Synthetic oligonucleotide
  modified_base 1: mod_base = OTHER; note = 2'-O-methyladenosine-3'-phosphorothioate
  modified_base 2: mod_base = OTHER; note = 2'-fluorocytidine-3'-phosphorothioate
  modified_base 3: mod_base = OTHER; note = 2'-O-methyluridine-3'-phosphate
  modified_base 4: mod_base = OTHER; note = 2'-O-methyladenosine-3'-phosphate
  modified_base 5: mod_base = OTHER; note = 2'-O-methylguanosine-3'-phosphate
  modified_base 6: mod_base = OTHER; note = 2'-fluoroguanosine-3'-phosphate
  modified_base 7: mod_base = OTHER; note = 2'-O-methylcytidine-3'-phosphate
  modified_base 8: mod_base = OTHER; note = 2'-fluoroadenosine-3'-phosphate
  modified_base 9: mod_base = OTHER; note = 2'-fluorouridine-3'-phosphate
  modified_base 10: mod_base = OTHER; note = 2'-O-methylguanosine-3'-phosphate
  modified_base 11: mod_base = OTHER; note = 2'-O-methyluridine-3'-phosphate
  modified_base 12: mod_base = OTHER; note = 2'-O-methyluridine-3'-phosphate
  modified_base 13: mod_base = OTHER; note = 2'-O-methylcytidine-3'-phosphate
  modified_base 14: mod_base = OTHER; note = 2'-fluoroadenosine-3'-phosphate
  modified_base 15: mod_base = OTHER; note = 2'-O-methylguanosine-3'-phosphate
  modified_base 16: mod_base = OTHER; note = 2'-fluorouridine-3'-phosphate
  modified_base 17: mod_base = OTHER; note = 2'-O-methylguanosine-3'-phosphate
  modified_base 18: mod_base = OTHER; note = 2'-O-methyladenosine-3'-phosphate
  modified_base 19: mod_base = OTHER; note = 2'-O-methyladenosine-3'-phosphate
  modified_base 20: mod_base = OTHER; note = 2'-O-methylguanosine-3'-phosphate
  modified_base 21: mod_base = OTHER; note = 2'-O-methylguanosine-3'-phosphorothioate
  modified_base 22: mod_base = OTHER; note = 2'-O-methyladenosine-3'-phosphorothioate
  modified_base 23: mod_base = OTHER; note = 2'-O-methylguanosine-3'-phosphate
actaggcatgttcagtgaaggag

SEQ ID NO: 3915 - RNA, 23 nt, synthetic construct
  source 1..23: mol_type = other RNA; note = Description of Artificial Sequence: Synthetic oligonucleotide
  modified_base 1: mod_base = OTHER; note = 2'-O-methyluridine-3'-phosphorothioate
  modified_base 2: mod_base = OTHER; note = 2'-fluoroguanosine-3'-phosphorothioate
  modified_base 3: mod_base = OTHER; note = 2'-O-methylguanosine-3'-phosphate
  modified_base 4: mod_base = OTHER; note = 2'-O-methyladenosine-3'-phosphate
  modified_base 5: mod_base = OTHER; note = 2'-O-methyluridine-3'-phosphate
  modified_base 6: mod_base = OTHER; note = 2'-fluorouridine-3'-phosphate
  modified_base 7: mod_base = OTHER; note = 2'-O-methyluridine-3'-phosphate
  modified_base 8: mod_base = OTHER; note = 2'-fluoroadenosine-3'-phosphate
  modified_base 9: mod_base = OTHER; note = 2'-fluorouridine-3'-phosphate
  modified_base 10: mod_base = OTHER; note = 2'-O-methyladenosine-3'-phosphate
  modified_base 11: mod_base = OTHER; note = 2'-O-methylcytidine-3'-phosphate
  modified_base 12: mod_base = OTHER; note = 2'-O-methyladenosine-3'-phosphate
  modified_base 13: mod_base = OTHER; note = 2'-O-methylcytidine-3'-phosphate
  modified_base 14: mod_base = OTHER; note = 2'-fluorouridine-3'-phosphate
  modified_base 15: mod_base = OTHER; note = 2'-O-methylguanosine-3'-phosphate
  modified_base 16: mod_base = OTHER; note = 2'-fluoroguanosine-3'-phosphate
  modified_base 17: mod_base = OTHER; note = 2'-O-methyladenosine-3'-phosphate
  modified_base 18: mod_base = OTHER; note = 2'-O-methyluridine-3'-phosphate
  modified_base 19: mod_base = OTHER; note = 2'-O-methylcytidine-3'-phosphate
  modified_base 20: mod_base = OTHER; note = 2'-O-methylcytidine-3'-phosphate
  modified_base 21: mod_base = OTHER; note = 2'-O-methylcytidine-3'-phosphorothioate
  modified_base 22: mod_base = OTHER; note = 2'-O-methyladenosine-3'-phosphorothioate
  modified_base 23: mod_base = OTHER; note = 2'-O-methylguanosine-3'-phosphate
tggatttatacactggatcccag

SEQ ID NO: 3916 - RNA, 23 nt, synthetic construct
  source 1..23: mol_type = other RNA; note = Description of Artificial Sequence: Synthetic oligonucleotide
  modified_base 1: mod_base = OTHER; note = 2'-O-methyluridine-3'-phosphorothioate
  modified_base 2: mod_base = OTHER; note = 2'-fluorouridine -3'-phosphorothioate
  modified_base 3: mod_base = OTHER; note = 2'-O-methylcytidine-3'-phosphate
  modified_base 4: mod_base = OTHER; note = 2'-O-methyladenosine-3'-phosphate
  modified_base 5: mod_base = OTHER; note = 2'-O-methylcytidine-3'-phosphate
  modified_base 6: mod_base = OTHER; note = 2'-fluorouridine-3'-phosphate
  modified_base 7: mod_base = OTHER; note = 2'-O-methylguanosine-3'-phosphate
  modified_base 8: mod_base = OTHER; note = 2'-fluorouridine-3'-phosphate
  modified_base 9: mod_base = OTHER; note = 2'-fluorouridine-3'-phosphate
  modified_base 10: mod_base = OTHER; note = 2'-O-methylcytidine-3'-phosphate
  modified_base 11: mod_base = OTHER; note = 2'-O-methyladenosine-3'-phosphate
  modified_base 12: mod_base = OTHER; note = 2'-O-methyladenosine-3'-phosphate
  modified_base 13: mod_base = OTHER; note = 2'-O-methylguanosine-3'-phosphate
  modified_base 14: mod_base = OTHER; note = 2'-fluoroguanosine-3'-phosphate
  modified_base 15: mod_base = OTHER; note = 2'-O-methyluridine-3'-phosphate
  modified_base 16: mod_base = OTHER; note = 2'-fluorouridine-3'-phosphate
  modified_base 17: mod_base = OTHER; note = 2'-O-methyluridine-3'-phosphate
  modified_base 18: mod_base = OTHER; note = 2'-O-methyladenosine-3'-phosphate
  modified_base 19: mod_base = OTHER; note = 2'-O-methyluridine-3'-phosphate
  modified_base 20: mod_base = OTHER; note = 2'-O-methyluridine-3'-phosphate
  modified_base 21: mod_base = OTHER; note = 2'-O-methylguanosine-3'-phosphorothioate
  modified_base 22: mod_base = OTHER; note = 2'-O-methylguanosine-3'-phosphorothioate
  modified_base 23: mod_base = OTHER; note = 2'-O-methylguanosine-3'-phosphate
ttcactgttcaaggtttattggg

SEQ ID NO: 3917 - RNA, 23 nt, synthetic construct
  source 1..23: mol_type = other RNA; note = Description of Artificial Sequence: Synthetic oligonucleotide
  modified_base 1: mod_base = OTHER; note = 2'-O-methyladenosine-3'-phosphorothioate
  modified_base 2: mod_base = OTHER; note = 2'-fluoroadenosine-3'-phosphorothioate
  modified_base 3: mod_base = OTHER; note = 2'-O-methylguanosine-3'-phosphate
  modified_base 4: mod_base = OTHER; note = 2'-O-methyladenosine-3'-phosphate
  modified_base 5: mod_base = OTHER; note = 2'-O-methyluridine-3'-phosphate
  modified_base 6: mod_base = OTHER; note = 2'-fluoroadenosine-3'-phosphate
  modified_base 7: mod_base = OTHER; note = 2'-O-methylcytidine-3'-phosphate
  modified_base 8: mod_base = OTHER; note = 2'-fluorouridine-3'-phosphate
  modified_base 9: mod_base = OTHER; note = 2'-fluoroguanosine-3'-phosphate
  modified_base 10: mod_base = OTHER; note = 2'-O-methyladenosine-3'-phosphate
  modified_base 11: mod_base = OTHER; note = 2'-O-methyluridine-3'-phosphate
  modified_base 12: mod_base = OTHER; note = 2'-O-methylguanosine-3'-phosphate
  modified_base 13: mod_base = OTHER; note = 2'-O-methylguanosine-3'-phosphate
  modified_base 14: mod_base = OTHER; note = 2'-fluorocytidine-3'-phosphate
  modified_base 15: mod_base = OTHER; note = 2'-O-methyladenosine-3'-phosphate
  modified_base 16: mod_base = OTHER; note = 2'-fluorocytidine-3'-phosphate
  modified_base 17: mod_base = OTHER; note = 2'-O-methyladenosine-3'-phosphate
  modified_base 18: mod_base = OTHER; note = 2'-O-methylguanosine-3'-phosphate
  modified_base 19: mod_base = OTHER; note = 2'-O-methylguanosine-3'-phosphate
  modified_base 20: mod_base = OTHER; note = 2'-O-methylcytidine-3'-phosphate
  modified_base 21: mod_base = OTHER; note = 2'-O-methylcytidine-3'-phosphorothioate
  modified_base 22: mod_base = OTHER; note = 2'-O-methyladenosine-3'-phosphorothioate
  modified_base 23: mod_base = OTHER; note = 2'-O-methyluridine-3'-phosphate
aagatactgatggcacaggccat

SEQ ID NO: 3918 - RNA, 23 nt, synthetic construct
  source 1..23: mol_type = other RNA; note = Description of Artificial Sequence: Synthetic oligonucleotide
  modified_base 1: mod_base = OTHER; note = 2'-O-methyluridine-3'-phosphorothioate
  modified_base 2: mod_base = OTHER; note = 2'-fluoroguanosine-3'-phosphorothioate
  modified_base 3: mod_base = OTHER; note = 2'-O-methyluridine-3'-phosphate
  modified_base 4: mod_base = OTHER; note = 2'-O-methylcytidine-3'-phosphate
  modified_base 5: mod_base = OTHER; note = 2'-O-methyluridine-3'-phosphate
  modified_base 6: mod_base = OTHER; note = 2'-fluorouridine-3'-phosphate
  modified_base 7: mod_base = OTHER; note = 2'-O-methylcytidine-3'-phosphate
  modified_base 8: mod_base = OTHER; note = 2'-fluoroguanosine-3'-phosphate
  modified_base 9: mod_base = OTHER; note = 2'-fluoroadenosine-3'-phosphate
  modified_base 10: mod_base = OTHER; note = 2'-O-methyluridine-3'-phosphate
  modified_base 11: mod_base = OTHER; note = 2'-O-methylguanosine-3'-phosphate
  modified_base 12: mod_base = OTHER; note = 2'-O-methyladenosine-3'-phosphate
  modified_base 13: mod_base = OTHER; note = 2'-O-methylcytidine-3'-phosphate
  modified_base 14: mod_base = OTHER; note = 2'-fluoroadenosine-3'-phosphate
  modified_base 15: mod_base = OTHER; note = 2'-O-methyluridine-3'-phosphate
  modified_base 16: mod_base = OTHER; note = 2'-fluorocytidine-3'-phosphate
  modified_base 17: mod_base = OTHER; note = 2'-O-methyladenosine-3'-phosphate
  modified_base 18: mod_base = OTHER; note = 2'-O-methyladenosine-3'-phosphate
  modified_base 19: mod_base = OTHER; note = 2'-O-methylcytidine-3'-phosphate
  modified_base 20: mod_base = OTHER; note = 2'-O-methyladenosine-3'-phosphate
  modified_base 21: mod_base = OTHER; note = 2'-O-methyladenosine-3'-phosphorothioate
  modified_base 22: mod_base = OTHER; note = 2'-O-methylguanosine-3'-phosphorothioate
  modified_base 23: mod_base = OTHER; note = 2'-O-methyladenosine-3'-phosphate
tgtcttcgatgacatcaacaaga

SEQ ID NO: 3919 - RNA, 23 nt, synthetic construct
  source 1..23: mol_type = other RNA; note = Description of Artificial Sequence: Synthetic oligonucleotide
  modified_base 1: mod_base = OTHER; note = 2'-O-methyladenosine-3'-phosphorothioate
  modified_base 2: mod_base = OTHER; note = 2'-fluorouridine -3'-phosphorothioate
  modified_base 3: mod_base = OTHER; note = 2'-O-methyluridine-3'-phosphate
  modified_base 4: mod_base = OTHER; note = 2'-O-methyladenosine-3'-phosphate
  modified_base 5: mod_base = OTHER; note = 2'-O-methyluridine-3'-phosphate
  modified_base 6: mod_base = OTHER; note = 2'-fluoroadenosine-3'-phosphate
  modified_base 7: mod_base = OTHER; note = 2'-O-methylcytidine-3'-phosphate
  modified_base 8: mod_base = OTHER; note = 2'-fluorouridine-3'-phosphate
  modified_base 9: mod_base = OTHER; note = 2'-fluorocytidine-3'-phosphate
  modified_base 10: mod_base = OTHER; note = 2'-O-methyluridine-3'-phosphate
  modified_base 11: mod_base = OTHER; note = 2'-O-methylcytidine-3'-phosphate
  modified_base 12: mod_base = OTHER; note = 2'-O-methyluridine-3'-phosphate
  modified_base 13: mod_base = OTHER; note = 2'-O-methylguanosine-3'-phosphate
  modified_base 14: mod_base = OTHER; note = 2'-fluorocytidine-3'-phosphate
  modified_base 15: mod_base = OTHER; note = 2'-O-methylcytidine-3'-phosphate
  modified_base 16: mod_base = OTHER; note = 2'-fluoroadenosine-3'-phosphate
  modified_base 17: mod_base = OTHER; note = 2'-O-methyladenosine-3'-phosphate
  modified_base 18: mod_base = OTHER; note = 2'-O-methyladenosine-3'-phosphate
  modified_base 19: mod_base = OTHER; note = 2'-O-methyluridine-3'-phosphate
  modified_base 20: mod_base = OTHER; note = 2'-O-methylcytidine-3'-phosphate
  modified_base 21: mod_base = OTHER; note = 2'-O-methyluridine-3'-phosphorothioate
  modified_base 22: mod_base = OTHER; note = 2'-O-methylguanosine-3'-phosphorothioate
  modified_base 23: mod_base = OTHER; note = 2'-O-methylcytidine-3'-phosphate
attatactctctgccaaatctgc

SEQ ID NO: 3920 - RNA, 23 nt, synthetic construct
  source 1..23: mol_type = other RNA; note = Description of Artificial Sequence: Synthetic oligonucleotide
  modified_base 1: mod_base = OTHER; note = 2'-O-methyluridine-3'-phosphorothioate
  modified_base 2: mod_base = OTHER; note = 2'-fluoroadenosine-3'-phosphorothioate
  modified_base 3: mod_base = OTHER; note = 2'-O-methylcytidine-3'-phosphate
  modified_base 4: mod_base = OTHER; note = 2'-O-methylcytidine-3'-phosphate
  modified_base 5: mod_base = OTHER; note = 2'-O-methylcytidine-3'-phosphate
  modified_base 6: mod_base = OTHER; note = 2'-fluorouridine-3'-phosphate
  modified_base 7: mod_base = OTHER; note = 2'-O-methyluridine-3'-phosphate
  modified_base 8: mod_base = OTHER; note = 2'-fluoroadenosine-3'-phosphate
  modified_base 9: mod_base = OTHER; note = 2'-fluoroadenosine-3'-phosphate
  modified_base 10: mod_base = OTHER; note = 2'-O-methyluridine-3'-phosphate
  modified_base 11: mod_base = OTHER; note = 2'-O-methylcytidine-3'-phosphate
  modified_base 12: mod_base = OTHER; note = 2'-O-methyladenosine-3'-phosphate
  modified_base 13: mod_base = OTHER; note = 2'-O-methyluridine-3'-phosphate
  modified_base 14: mod_base = OTHER; note = 2'-fluoroguanosine-3'-phosphate
  modified_base 15: mod_base = OTHER; note = 2'-O-methylguanosine-3'-phosphate
  modified_base 16: mod_base = OTHER; note = 2'-fluorouridine-3'-phosphate
  modified_base 17: mod_base = OTHER; note = 2'-O-methylguanosine-3'-phosphate
  modified_base 18: mod_base = OTHER; note = 2'-O-methylguanosine-3'-phosphate
  modified_base 19: mod_base = OTHER; note = 2'-O-methyladenosine-3'-phosphate
  modified_base 20: mod_base = OTHER; note = 2'-O-methyladenosine-3'-phosphate
  modified_base 21: mod_base = OTHER; note = 2'-O-methyladenosine-3'-phosphorothioate
  modified_base 22: mod_base = OTHER; note = 2'-O-methylcytidine-3'-phosphorothioate
  modified_base 23: mod_base = OTHER; note = 2'-O-methyluridine-3'-phosphate
tacccttaatcatggtggaaact

SEQ ID NO: 3921 - RNA, 23 nt, synthetic construct
  source 1..23: mol_type = other RNA; note = Description of Artificial Sequence: Synthetic oligonucleotide
  modified_base 1: mod_base = OTHER; note = 2'-O-methyluridine-3'-phosphorothioate
  modified_base 2: mod_base = OTHER; note = 2'-fluoroadenosine-3'-phosphorothioate
  modified_base 3: mod_base = OTHER; note = 2'-O-methylguanosine-3'-phosphate
  modified_base 4: mod_base = OTHER; note = 2'-O-methyladenosine-3'-phosphate
  modified_base 5: mod_base = OTHER; note = 2'-O-methyladenosine-3'-phosphate
  modified_base 6: mod_base = OTHER; note = 2'-fluorouridine-3'-phosphate
  modified_base 7: mod_base = OTHER; note = 2'-O-methylcytidine-3'-phosphate
  modified_base 8: mod_base = OTHER; note = 2'-fluorocytidine-3'-phosphate
  modified_base 9: mod_base = OTHER; note = 2'-fluorouridine-3'-phosphate
  modified_base 10: mod_base = OTHER; note = 2'-O-methylguanosine-3'-phosphate
  modified_base 11: mod_base = OTHER; note = 2'-O-methyluridine-3'-phosphate
  modified_base 12: mod_base = OTHER; note = 2'-O-methyluridine-3'-phosphate
  modified_base 13: mod_base = OTHER; note = 2'-O-methylguanosine-3'-phosphate
  modified_base 14: mod_base = OTHER; note = 2'-fluorouridine-3'-phosphate
  modified_base 15: mod_base = OTHER; note = 2'-O-methyladenosine-3'-phosphate
  modified_base 16: mod_base = OTHER; note = 2'-fluoroguanosine-3'-phosphate
  modified_base 17: mod_base = OTHER; note = 2'-O-methylcytidine-3'-phosphate
  modified_base 18: mod_base = OTHER; note = 2'-O-methylcytidine-3'-phosphate
  modified_base 19: mod_base = OTHER; note = 2'-O-methyluridine-3'-phosphate
  modified_base 20: mod_base = OTHER; note = 2'-O-methyladenosine-3'-phosphate
  modified_base 21: mod_base = OTHER; note = 2'-O-methylguanosine-3'-phosphorothioate
  modified_base 22: mod_base = OTHER; note = 2'-O-methyladenosine-3'-phosphorothioate
  modified_base 23: mod_base = OTHER; note = 2'-O-methylcytidine-3'-phosphate
tagaatcctgttgtagcctagac

SEQ ID NO: 3922 - RNA, 23 nt, synthetic construct
  source 1..23: mol_type = other RNA; note = Description of Artificial Sequence: Synthetic oligonucleotide
  modified_base 1: mod_base = OTHER; note = 2'-O-methyluridine-3'-phosphorothioate
  modified_base 2: mod_base = OTHER; note = 2'-fluoroguanosine-3'-phosphorothioate
  modified_base 3: mod_base = OTHER; note = 2'-O-methyladenosine-3'-phosphate
  modified_base 4: mod_base = OTHER; note = 2'-O-methylcytidine-3'-phosphate
  modified_base 5: mod_base = OTHER; note = 2'-O-methyladenosine-3'-phosphate
  modified_base 6: mod_base = OTHER; note = 2'-fluoroadenosine-3'-phosphate
  modified_base 7: mod_base = OTHER; note = 2'-O-methylcytidine-3'-phosphate
  modified_base 8: mod_base = OTHER; note = 2'-fluoroadenosine-3'-phosphate
  modified_base 9: mod_base = OTHER; note = 2'-fluorouridine-3'-phosphate
  modified_base 10: mod_base = OTHER; note = 2'-O-methylguanosine-3'-phosphate
  modified_base 11: mod_base = OTHER; note = 2'-O-methylcytidine-3'-phosphate
  modified_base 12: mod_base = OTHER; note = 2'-O-methyladenosine-3'-phosphate
  modified_base 13: mod_base = OTHER; note = 2'-O-methylcytidine-3'-phosphate
  modified_base 14: mod_base = OTHER; note = 2'-fluoroadenosine-3'-phosphate
  modified_base 15: mod_base = OTHER; note = 2'-O-methyladenosine-3'-phosphate
  modified_base 16: mod_base = OTHER; note = 2'-fluorocytidine-3'-phosphate
  modified_base 17: mod_base = OTHER; note = 2'-O-methylcytidine-3'-phosphate
  modified_base 18: mod_base = OTHER; note = 2'-O-methyluridine-3'-phosphate
  modified_base 19: mod_base = OTHER; note = 2'-O-methylcytidine-3'-phosphate
  modified_base 20: mod_base = OTHER; note = 2'-O-methylcytidine-3'-phosphate
  modified_base 21: mod_base = OTHER; note = 2'-O-methyladenosine-3'-phosphorothioate
  modified_base 22: mod_base = OTHER; note = 2'-O-methylcytidine-3'-phosphorothioate
  modified_base 23: mod_base = OTHER; note = 2'-O-methylcytidine-3'-phosphate
tgacaacatgcacaacctccacc

SEQ ID NO: 3923 - RNA, 23 nt, synthetic construct
  source 1..23: mol_type = other RNA; note = Description of Artificial Sequence: Synthetic oligonucleotide
  modified_base 1: mod_base = OTHER; note = 2'-O-methyladenosine-3'-phosphorothioate
  modified_base 2: mod_base = OTHER; note = 2'-fluoroguanosine-3'-phosphorothioate
  modified_base 3: mod_base = OTHER; note = 2'-O-methylguanosine-3'-phosphate
  modified_base 4: mod_base = OTHER; note = 2'-O-methylcytidine-3'-phosphate
  modified_base 5: mod_base = OTHER; note = 2'-O-methyladenosine-3'-phosphate
  modified_base 6: mod_base = OTHER; note = 2'-fluorouridine-3'-phosphate
  modified_base 7: mod_base = OTHER; note = 2'-O-methylguanosine-3'-phosphate
  modified_base 8: mod_base = OTHER; note = 2'-fluorouridine-3'-phosphate
  modified_base 9: mod_base = OTHER; note = 2'-fluorouridine-3'-phosphate
  modified_base 10: mod_base = OTHER; note = 2'-O-methylcytidine-3'-phosphate
  modified_base 11: mod_base = OTHER; note = 2'-O-methyladenosine-3'-phosphate
  modified_base 12: mod_base = OTHER; note = 2'-O-methylguanosine-3'-phosphate
  modified_base 13: mod_base = OTHER; note = 2'-O-methyluridine-3'-phosphate
  modified_base 14: mod_base = OTHER; note = 2'-fluoroguanosine-3'-phosphate
  modified_base 15: mod_base = OTHER; note = 2'-O-methyladenosine-3'-phosphate
  modified_base 16: mod_base = OTHER; note = 2'-fluoroadenosine-3'-phosphate
  modified_base 17: mod_base = OTHER; note = 2'-O-methylguanosine-3'-phosphate
  modified_base 18: mod_base = OTHER; note = 2'-O-methylguanosine-3'-phosphate
  modified_base 19: mod_base = OTHER; note = 2'-O-methyladenosine-3'-phosphate
  modified_base 20: mod_base = OTHER; note = 2'-O-methylguanosine-3'-phosphate
  modified_base 21: mod_base = OTHER; note = 2'-O-methylcytidine-3'-phosphorothioate
  modified_base 22: mod_base = OTHER; note = 2'-O-methylcytidine-3'-phosphorothioate
  modified_base 23: mod_base = OTHER; note = 2'-O-methyladenosine-3'-phosphate
aggcatgttcagtgaaggagcca

SEQ ID NO: 3924 - RNA, 23 nt, synthetic construct
  source 1..23: mol_type = other RNA; note = Description of Artificial Sequence: Synthetic oligonucleotide
  modified_base 1: mod_base = OTHER; note = 2'-O-methyluridine-3'-phosphorothioate
  modified_base 2: mod_base = OTHER; note = 2'-fluoroadenosine-3'-phosphorothioate
  modified_base 3: mod_base = OTHER; note = 2'-O-methyluridine-3'-phosphate
  modified_base 4: mod_base = OTHER; note = 2'-O-methyluridine-3'-phosphate
  modified_base 5: mod_base = OTHER; note = 2'-O-methylguanosine-3'-phosphate
  modified_base 6: mod_base = OTHER; note = 2'-fluoroguanosine-3'-phosphate
  modified_base 7: mod_base = OTHER; note = 2'-O-methyladenosine-3'-phosphate
  modified_base 8: mod_base = OTHER; note = 2'-fluorocytidine-3'-phosphate
  modified_base 9: mod_base = OTHER; note = 2'-fluorouridine-3'-phosphate
  modified_base 10: mod_base = OTHER; note = 2'-O-methyluridine-3'-phosphate
  modified_base 11: mod_base = OTHER; note = 2'-O-methylguanosine-3'-phosphate
  modified_base 12: mod_base = OTHER; note = 2'-O-methylguanosine-3'-phosphate
  modified_base 13: mod_base = OTHER; note = 2'-O-methyladenosine-3'-phosphate
  modified_base 14: mod_base = OTHER; note = 2'-fluoroadenosine-3'-phosphate
  modified_base 15: mod_base = OTHER; note = 2'-O-methylcytidine-3'-phosphate
  modified_base 16: mod_base = OTHER; note = 2'-fluorocytidine-3'-phosphate
  modified_base 17: mod_base = OTHER; note = 2'-O-methyladenosine-3'-phosphate
  modified_base 18: mod_base = OTHER; note = 2'-O-methyladenosine-3'-phosphate
  modified_base 19: mod_base = OTHER; note = 2'-O-methyladenosine-3'-phosphate
  modified_base 20: mod_base = OTHER; note = 2'-O-methyladenosine-3'-phosphate
  modified_base 21: mod_base = OTHER; note = 2'-O-methylguanosine-3'-phosphorothioate
  modified_base 22: mod_base = OTHER; note = 2'-O-methylguanosine-3'-phosphorothioate
  modified_base 23: mod_base = OTHER; note = 2'-O-methyladenosine-3'-phosphate
tattggacttggaaccaaaagga

SEQ ID NO: 3925 - RNA, 23 nt, synthetic construct
  source 1..23: mol_type = other RNA; note = Description of Artificial Sequence: Synthetic oligonucleotide
  modified_base 1: mod_base = OTHER; note = 2'-O-methyluridine-3'-phosphorothioate
  modified_base 2: mod_base = OTHER; note = 2'-fluoroadenosine-3'-phosphorothioate
  modified_base 3: mod_base = OTHER; note = 2'-O-methyladenosine-3'-phosphate
  modified_base 4: mod_base = OTHER; note = 2'-O-methylguanosine-3'-phosphate
  modified_base 5: mod_base = OTHER; note = 2'-O-methyladenosine-3'-phosphate
  modified_base 6: mod_base = OTHER; note = 2'-fluorouridine-3'-phosphate
  modified_base 7: mod_base = OTHER; note = 2'-O-methyladenosine-3'-phosphate
  modified_base 8: mod_base = OTHER; note = 2'-fluorocytidine-3'-phosphate
  modified_base 9: mod_base = OTHER; note = 2'-fluorouridine-3'-phosphate
  modified_base 10: mod_base = OTHER; note = 2'-O-methylguanosine-3'-phosphate
  modified_base 11: mod_base = OTHER; note = 2'-O-methyladenosine-3'-phosphate
  modified_base 12: mod_base = OTHER; note = 2'-O-methyluridine-3'-phosphate
  modified_base 13: mod_base = OTHER; note = 2'-O-methylguanosine-3'-phosphate
  modified_base 14: mod_base = OTHER; note = 2'-fluoroguanosine-3'-phosphate
  modified_base 15: mod_base = OTHER; note = 2'-O-methylcytidine-3'-phosphate
  modified_base 16: mod_base = OTHER; note = 2'-fluoroadenosine-3'-phosphate
  modified_base 17: mod_base = OTHER; note = 2'-O-methylcytidine-3'-phosphate
  modified_base 18: mod_base = OTHER; note = 2'-O-methyladenosine-3'-phosphate
  modified_base 19: mod_base = OTHER; note = 2'-O-methylguanosine-3'-phosphate
  modified_base 20: mod_base = OTHER; note = 2'-O-methylguanosine-3'-phosphate
  modified_base 21: mod_base = OTHER; note = 2'-O-methylcytidine-3'-phosphorothioate
  modified_base 22: mod_base = OTHER; note = 2'-O-methylcytidine-3'-phosphorothioate
  modified_base 23: mod_base = OTHER; note = 2'-O-methyladenosine-3'-phosphate
taagatactgatggcacaggcca

SEQ ID NO: 3926 - RNA, 23 nt, synthetic construct
  source 1..23: mol_type = other RNA; note = Description of Artificial Sequence: Synthetic oligonucleotide
  modified_base 1: mod_base = OTHER; note = 2'-O-methyluridine-3'-phosphorothioate
  modified_base 2: mod_base = OTHER; note = 2'-fluoroadenosine-3'-phosphorothioate
  modified_base 3: mod_base = OTHER; note = 2'-O-methylguanosine-3'-phosphate
  modified_base 4: mod_base = OTHER; note = 2'-O-methyluridine-3'-phosphate
  modified_base 5: mod_base = OTHER; note = 2'-O-methyluridine-3'-phosphate
  modified_base 6: mod_base = OTHER; note = 2'-fluorouridine-3'-phosphate
  modified_base 7: mod_base = OTHER; note = 2'-O-methylguanosine-3'-phosphate
  modified_base 8: mod_base = OTHER; note = 2'-fluoroadenosine-3'-phosphate
  modified_base 9: mod_base = OTHER; note = 2'-fluorouridine-3'-phosphate
  modified_base 10: mod_base = OTHER; note = 2'-O-methylcytidine-3'-phosphate
  modified_base 11: mod_base = OTHER; note = 2'-O-methyladenosine-3'-phosphate
  modified_base 12: mod_base = OTHER; note = 2'-O-methylcytidine-3'-phosphate
  modified_base 13: mod_base = OTHER; note = 2'-O-methylcytidine-3'-phosphate
  modified_base 14: mod_base = OTHER; note = 2'-fluorouridine-3'-phosphate
  modified_base 15: mod_base = OTHER; note = 2'-O-methylcytidine-3'-phosphate
  modified_base 16: mod_base = OTHER; note = 2'-fluoroadenosine-3'-phosphate
  modified_base 17: mod_base = OTHER; note = 2'-O-methyluridine-3'-phosphate
  modified_base 18: mod_base = OTHER; note = 2'-O-methyladenosine-3'-phosphate
  modified_base 19: mod_base = OTHER; note = 2'-O-methyladenosine-3'-phosphate
  modified_base 20: mod_base = OTHER; note = 2'-O-methylguanosine-3'-phosphate
  modified_base 21: mod_base = OTHER; note = 2'-O-methylcytidine-3'-phosphorothioate
  modified_base 22: mod_base = OTHER; note = 2'-O-methyladenosine-3'-phosphorothioate
  modified_base 23: mod_base = OTHER; note = 2'-O-methylcytidine-3'-phosphate
tagtttgatcacctcataagcac

SEQ ID NO: 3927 - RNA, 23 nt, synthetic construct
  source 1..23: mol_type = other RNA; note = Description of Artificial Sequence: Synthetic oligonucleotide
  modified_base 1: mod_base = OTHER; note = 2'-O-methyluridine-3'-phosphorothioate
  modified_base 2: mod_base = OTHER; note = 2'-fluoroguanosine-3'-phosphorothioate
  modified_base 3: mod_base = OTHER; note = 2'-O-methyladenosine-3'-phosphate
  modified_base 4: mod_base = OTHER; note = 2'-O-methylguanosine-3'-phosphate
  modified_base 5: mod_base = OTHER; note = 2'-O-methyluridine-3'-phosphate
  modified_base 6: mod_base = OTHER; note = 2'-fluorouridine-3'-phosphate
  modified_base 7: mod_base = OTHER; note = 2'-O-methyluridine-3'-phosphate
  modified_base 8: mod_base = OTHER; note = 2'-fluoroguanosine-3'-phosphate
  modified_base 9: mod_base = OTHER; note = 2'-fluoroadenosine-3'-phosphate
  modified_base 10: mod_base = OTHER; note = 2'-O-methyluridine-3'-phosphate
  modified_base 11: mod_base = OTHER; note = 2'-O-methylcytidine-3'-phosphate
  modified_base 12: mod_base = OTHER; note = 2'-O-methyladenosine-3'-phosphate
  modified_base 13: mod_base = OTHER; note = 2'-O-methylcytidine-3'-phosphate
  modified_base 14: mod_base = OTHER; note = 2'-fluorocytidine-3'-phosphate
  modified_base 15: mod_base = OTHER; note = 2'-O-methyluridine-3'-phosphate
  modified_base 16: mod_base = OTHER; note = 2'-fluorocytidine-3'-phosphate
  modified_base 17: mod_base = OTHER; note = 2'-O-methyladenosine-3'-phosphate
  modified_base 18: mod_base = OTHER; note = 2'-O-methyluridine-3'-phosphate
  modified_base 19: mod_base = OTHER; note = 2'-O-methyladenosine-3'-phosphate
  modified_base 20: mod_base = OTHER; note = 2'-O-methyladenosine-3'-phosphate
  modified_base 21: mod_base = OTHER; note = 2'-O-methylguanosine-3'-phosphorothioate
  modified_base 22: mod_base = OTHER; note = 2'-O-methylcytidine-3'-phosphorothioate
  modified_base 23: mod_base = OTHER; note = 2'-O-methyladenosine-3'-phosphate
tgagtttgatcacctcataagca

SEQ ID NO: 3928 - RNA, 23 nt, synthetic construct
  source 1..23: mol_type = other RNA; note = Description of Artificial Sequence: Synthetic oligonucleotide
  modified_base 1: mod_base = OTHER; note = 2'-O-methyladenosine-3'-phosphorothioate
  modified_base 2: mod_base = OTHER; note = 2'-fluorouridine -3'-phosphorothioate
  modified_base 3: mod_base = OTHER; note = 2'-O-methyluridine-3'-phosphate
  modified_base 4: mod_base = OTHER; note = 2'-O-methylcytidine-3'-phosphate
  modified_base 5: mod_base = OTHER; note = 2'-O-methyluridine-3'-phosphate
  modified_base 6: mod_base = OTHER; note = 2'-fluoroguanosine-3'-phosphate
  modified_base 7: mod_base = OTHER; note = 2'-O-methyluridine-3'-phosphate
  modified_base 8: mod_base = OTHER; note = 2'-fluorocytidine-3'-phosphate
  modified_base 9: mod_base = OTHER; note = 2'-fluorocytidine-3'-phosphate
  modified_base 10: mod_base = OTHER; note = 2'-O-methylcytidine-3'-phosphate
  modified_base 11: mod_base = OTHER; note = 2'-O-methyladenosine-3'-phosphate
  modified_base 12: mod_base = OTHER; note = 2'-O-methyladenosine-3'-phosphate
  modified_base 13: mod_base = OTHER; note = 2'-O-methyladenosine-3'-phosphate
  modified_base 14: mod_base = OTHER; note = 2'-fluoroadenosine-3'-phosphate
  modified_base 15: mod_base = OTHER; note = 2'-O-methyluridine-3'-phosphate
  modified_base 16: mod_base = OTHER; note = 2'-fluoroguanosine-3'-phosphate
  modified_base 17: mod_base = OTHER; note = 2'-O-methylcytidine-3'-phosphate
  modified_base 18: mod_base = OTHER; note = 2'-O-methyladenosine-3'-phosphate
  modified_base 19: mod_base = OTHER; note = 2'-O-methyladenosine-3'-phosphate
  modified_base 20: mod_base = OTHER; note = 2'-O-methylguanosine-3'-phosphate
  modified_base 21: mod_base = OTHER; note = 2'-O-methylguanosine-3'-phosphorothioate
  modified_base 22: mod_base = OTHER; note = 2'-O-methyladenosine-3'-phosphorothioate
  modified_base 23: mod_base = OTHER; note = 2'-O-methyladenosine-3'-phosphate
attctgtcccaaaatgcaaggaa

SEQ ID NO: 3929 - RNA, 23 nt, synthetic construct
  source 1..23: mol_type = other RNA; note = Description of Artificial Sequence: Synthetic oligonucleotide
  modified_base 1: mod_base = OTHER; note = 2'-O-methyluridine-3'-phosphorothioate
  modified_base 2: mod_base = OTHER; note = 2'-fluoroguanosine-3'-phosphorothioate
  modified_base 3: mod_base = OTHER; note = 2'-O-methylcytidine-3'-phosphate
  modified_base 4: mod_base = OTHER; note = 2'-O-methylcytidine-3'-phosphate
  modified_base 5: mod_base = OTHER; note = 2'-O-methyladenosine-3'-phosphate
  modified_base 6: mod_base = OTHER; note = 2'-fluorouridine-3'-phosphate
  modified_base 7: mod_base = OTHER; note = 2'-O-methyladenosine-3'-phosphate
  modified_base 8: mod_base = OTHER; note = 2'-fluorouridine-3'-phosphate
  modified_base 9: mod_base = OTHER; note = 2'-fluorouridine-3'-phosphate
  modified_base 10: mod_base = OTHER; note = 2'-O-methylguanosine-3'-phosphate
  modified_base 11: mod_base = OTHER; note = 2'-O-methylguanosine-3'-phosphate
  modified_base 12: mod_base = OTHER; note = 2'-O-methyladenosine-3'-phosphate
  modified_base 13: mod_base = OTHER; note = 2'-O-methylcytidine-3'-phosphate
  modified_base 14: mod_base = OTHER; note = 2'-fluorouridine-3'-phosphate
  modified_base 15: mod_base = OTHER; note = 2'-O-methyluridine-3'-phosphate
  modified_base 16: mod_base = OTHER; note = 2'-fluoroguanosine-3'-phosphate
  modified_base 17: mod_base = OTHER; note = 2'-O-methylguanosine-3'-phosphate
  modified_base 18: mod_base = OTHER; note = 2'-O-methyladenosine-3'-phosphate
  modified_base 19: mod_base = OTHER; note = 2'-O-methyladenosine-3'-phosphate
  modified_base 20: mod_base = OTHER; note = 2'-O-methylcytidine-3'-phosphate
  modified_base 21: mod_base = OTHER; note = 2'-O-methylcytidine-3'-phosphorothioate
  modified_base 22: mod_base = OTHER; note = 2'-O-methyladenosine-3'-phosphorothioate
  modified_base 23: mod_base = OTHER; note = 2'-O-methyladenosine-3'-phosphate
tgccatattggacttggaaccaa

SEQ ID NO: 3930 - RNA, 23 nt, synthetic construct
  source 1..23: mol_type = other RNA; note = Description of Artificial Sequence: Synthetic oligonucleotide
  modified_base 1: mod_base = OTHER; note = 2'-O-methyluridine-3'-phosphorothioate
  modified_base 2: mod_base = OTHER; note = 2'-fluorocytidine-3'-phosphorothioate
  modified_base 3: mod_base = OTHER; note = 2'-O-methyluridine-3'-phosphate
  modified_base 4: mod_base = OTHER; note = 2'-O-methylguanosine-3'-phosphate
  modified_base 5: mod_base = OTHER; note = 2'-O-methyluridine-3'-phosphate
  modified_base 6: mod_base = OTHER; note = 2'-fluorouridine-3'-phosphate
  modified_base 7: mod_base = OTHER; note = 2'-O-methylguanosine-3'-phosphate
  modified_base 8: mod_base = OTHER; note = 2'-fluorouridine-3'-phosphate
  modified_base 9: mod_base = OTHER; note = 2'-fluoroadenosine-3'-phosphate
  modified_base 10: mod_base = OTHER; note = 2'-O-methylguanosine-3'-phosphate
  modified_base 11: mod_base = OTHER; note = 2'-O-methylcytidine-3'-phosphate
  modified_base 12: mod_base = OTHER; note = 2'-O-methylcytidine-3'-phosphate
  modified_base 13: mod_base = OTHER; note = 2'-O-methyluridine-3'-phosphate
  modified_base 14: mod_base = OTHER; note = 2'-fluoroadenosine-3'-phosphate
  modified_base 15: mod_base = OTHER; note = 2'-O-methylguanosine-3'-phosphate
  modified_base 16: mod_base = OTHER; note = 2'-fluoroadenosine-3'-phosphate
  modified_base 17: mod_base = OTHER; note = 2'-O-methylcytidine-3'-phosphate
  modified_base 18: mod_base = OTHER; note = 2'-O-methyladenosine-3'-phosphate
  modified_base 19: mod_base = OTHER; note = 2'-O-methylguanosine-3'-phosphate
  modified_base 20: mod_base = OTHER; note = 2'-O-methyluridine-3'-phosphate
  modified_base 21: mod_base = OTHER; note = 2'-O-methylguanosine-3'-phosphorothioate
  modified_base 22: mod_base = OTHER; note = 2'-O-methyladenosine-3'-phosphorothioate
  modified_base 23: mod_base = OTHER; note = 2'-O-methyladenosine-3'-phosphate
tctgttgtagcctagacagtgaa

SEQ ID NO: 3931 - RNA, 23 nt, synthetic construct
  source 1..23: mol_type = other RNA; note = Description of Artificial Sequence: Synthetic oligonucleotide
  modified_base 1: mod_base = OTHER; note = 2'-O-methyluridine-3'-phosphorothioate
  modified_base 2: mod_base = OTHER; note = 2'-fluorocytidine-3'-phosphorothioate
  modified_base 3: mod_base = OTHER; note = 2'-O-methylcytidine-3'-phosphate
  modified_base 4: mod_base = OTHER; note = 2'-O-methyluridine-3'-phosphate
  modified_base 5: mod_base = OTHER; note = 2'-O-methylguanosine-3'-phosphate
  modified_base 6: mod_base = OTHER; note = 2'-fluorouridine-3'-phosphate
  modified_base 7: mod_base = OTHER; note = 2'-O-methyluridine-3'-phosphate
  modified_base 8: mod_base = OTHER; note = 2'-fluoroguanosine-3'-phosphate
  modified_base 9: mod_base = OTHER; note = 2'-fluorouridine-3'-phosphate
  modified_base 10: mod_base = OTHER; note = 2'-O-methyladenosine-3'-phosphate
  modified_base 11: mod_base = OTHER; note = 2'-O-methylguanosine-3'-phosphate
  modified_base 12: mod_base = OTHER; note = 2'-O-methylcytidine-3'-phosphate
  modified_base 13: mod_base = OTHER; note = 2'-O-methylcytidine-3'-phosphate
  modified_base 14: mod_base = OTHER; note = 2'-fluorouridine-3'-phosphate
  modified_base 15: mod_base = OTHER; note = 2'-O-methyladenosine-3'-phosphate
  modified_base 16: mod_base = OTHER; note = 2'-fluoroguanosine-3'-phosphate
  modified_base 17: mod_base = OTHER; note = 2'-O-methyladenosine-3'-phosphate
  modified_base 18: mod_base = OTHER; note = 2'-O-methylcytidine-3'-phosphate
  modified_base 19: mod_base = OTHER; note = 2'-O-methyladenosine-3'-phosphate
  modified_base 20: mod_base = OTHER; note = 2'-O-methylguanosine-3'-phosphate
  modified_base 21: mod_base = OTHER; note = 2'-O-methyluridine-3'-phosphorothioate
  modified_base 22: mod_base = OTHER; note = 2'-O-methylguanosine-3'-phosphorothioate
  modified_base 23: mod_base = OTHER; note = 2'-O-methyladenosine-3'-phosphate
tcctgttgtagcctagacagtga

SEQ ID NO: 3932 - RNA, 23 nt, synthetic construct
  source 1..23: mol_type = other RNA; note = Description of Artificial Sequence: Synthetic oligonucleotide
  modified_base 1: mod_base = OTHER; note = 2'-O-methyluridine-3'-phosphorothioate
  modified_base 2: mod_base = OTHER; note = 2'-fluorocytidine-3'-phosphorothioate
  modified_base 3: mod_base = OTHER; note = 2'-O-methylcytidine-3'-phosphate
  modified_base 4: mod_base = OTHER; note = 2'-O-methyladenosine-3'-phosphate
  modified_base 5: mod_base = OTHER; note = 2'-O-methyladenosine-3'-phosphate
  modified_base 6: mod_base = OTHER; note = 2'-fluorocytidine-3'-phosphate
  modified_base 7: mod_base = OTHER; note = 2'-O-methyladenosine-3'-phosphate
  modified_base 8: mod_base = OTHER; note = 2'-fluoroadenosine-3'-phosphate
  modified_base 9: mod_base = OTHER; note = 2'-fluorocytidine-3'-phosphate
  modified_base 10: mod_base = OTHER; note = 2'-O-methyluridine-3'-phosphate
  modified_base 11: mod_base = OTHER; note = 2'-O-methylguanosine-3'-phosphate
  modified_base 12: mod_base = OTHER; note = 2'-O-methyluridine-3'-phosphate
  modified_base 13: mod_base = OTHER; note = 2'-O-methyladenosine-3'-phosphate
  modified_base 14: mod_base = OTHER; note = 2'-fluoroadenosine-3'-phosphate
  modified_base 15: mod_base = OTHER; note = 2'-O-methyluridine-3'-phosphate
  modified_base 16: mod_base = OTHER; note = 2'-fluorocytidine-3'-phosphate
  modified_base 17: mod_base = OTHER; note = 2'-O-methyluridine-3'-phosphate
  modified_base 18: mod_base = OTHER; note = 2'-O-methyluridine-3'-phosphate
  modified_base 19: mod_base = OTHER; note = 2'-O-methyladenosine-3'-phosphate
  modified_base 20: mod_base = OTHER; note = 2'-O-methyluridine-3'-phosphate
  modified_base 21: mod_base = OTHER; note = 2'-O-methyluridine-3'-phosphorothioate
  modified_base 22: mod_base = OTHER; note = 2'-O-methylcytidine-3'-phosphorothioate
  modified_base 23: mod_base = OTHER; note = 2'-O-methyluridine-3'-phosphate
tccaacaactgtaatcttattct

SEQ ID NO: 3933 - RNA, 23 nt, synthetic construct
  source 1..23: mol_type = other RNA; note = Description of Artificial Sequence: Synthetic oligonucleotide
  modified_base 1: mod_base = OTHER; note = 2'-O-methyluridine-3'-phosphorothioate
  modified_base 2: mod_base = OTHER; note = 2'-fluoroadenosine-3'-phosphorothioate
  modified_base 3: mod_base = OTHER; note = 2'-O-methylcytidine-3'-phosphate
  modified_base 4: mod_base = OTHER; note = 2'-O-methylcytidine-3'-phosphate
  modified_base 5: mod_base = OTHER; note = 2'-O-methyluridine-3'-phosphate
  modified_base 6: mod_base = OTHER; note = 2'-fluorocytidine-3'-phosphate
  modified_base 7: mod_base = OTHER; note = 2'-O-methyladenosine-3'-phosphate
  modified_base 8: mod_base = OTHER; note = 2'-fluorouridine-3'-phosphate
  modified_base 9: mod_base = OTHER; note = 2'-fluoroadenosine-3'-phosphate
  modified_base 10: mod_base = OTHER; note = 2'-O-methyladenosine-3'-phosphate
  modified_base 11: mod_base = OTHER; note = 2'-O-methylguanosine-3'-phosphate
  modified_base 12: mod_base = OTHER; note = 2'-O-methylcytidine-3'-phosphate
  modified_base 13: mod_base = OTHER; note = 2'-O-methyladenosine-3'-phosphate
  modified_base 14: mod_base = OTHER; note = 2'-fluorocytidine-3'-phosphate
  modified_base 15: mod_base = OTHER; note = 2'-O-methyluridine-3'-phosphate
  modified_base 16: mod_base = OTHER; note = 2'-fluorocytidine-3'-phosphate
  modified_base 17: mod_base = OTHER; note = 2'-O-methyluridine-3'-phosphate
  modified_base 18: mod_base = OTHER; note = 2'-O-methylcytidine-3'-phosphate
  modified_base 19: mod_base = OTHER; note = 2'-O-methyladenosine-3'-phosphate
  modified_base 20: mod_base = OTHER; note = 2'-O-methyladenosine-3'-phosphate
  modified_base 21: mod_base = OTHER; note = 2'-O-methylcytidine-3'-phosphorothioate
  modified_base 22: mod_base = OTHER; note = 2'-O-methylcytidine-3'-phosphorothioate
  modified_base 23: mod_base = OTHER; note = 2'-O-methyladenosine-3'-phosphate
tacctcataagcactctcaacca

SEQ ID NO: 3934 - RNA, 23 nt, synthetic construct
  source 1..23: mol_type = other RNA; note = Description of Artificial Sequence: Synthetic oligonucleotide
  modified_base 1: mod_base = OTHER; note = 2'-O-methyluridine-3'-phosphorothioate
  modified_base 2: mod_base = OTHER; note = 2'-fluoroadenosine-3'-phosphorothioate
  modified_base 3: mod_base = OTHER; note = 2'-O-methyladenosine-3'-phosphate
  modified_base 4: mod_base = OTHER; note = 2'-O-methyluridine-3'-phosphate
  modified_base 5: mod_base = OTHER; note = 2'-O-methylcytidine-3'-phosphate
  modified_base 6: mod_base = OTHER; note = 2'-fluorocytidine-3'-phosphate
  modified_base 7: mod_base = OTHER; note = 2'-O-methyluridine-3'-phosphate
  modified_base 8: mod_base = OTHER; note = 2'-fluoroguanosine-3'-phosphate
  modified_base 9: mod_base = OTHER; note = 2'-fluorouridine-3'-phosphate
  modified_base 10: mod_base = OTHER; note = 2'-O-methyluridine-3'-phosphate
  modified_base 11: mod_base = OTHER; note = 2'-O-methylguanosine-3'-phosphate
  modified_base 12: mod_base = OTHER; note = 2'-O-methyluridine-3'-phosphate
  modified_base 13: mod_base = OTHER; note = 2'-O-methyladenosine-3'-phosphate
  modified_base 14: mod_base = OTHER; note = 2'-fluoroguanosine-3'-phosphate
  modified_base 15: mod_base = OTHER; note = 2'-O-methylcytidine-3'-phosphate
  modified_base 16: mod_base = OTHER; note = 2'-fluorocytidine-3'-phosphate
  modified_base 17: mod_base = OTHER; note = 2'-O-methyluridine-3'-phosphate
  modified_base 18: mod_base = OTHER; note = 2'-O-methyladenosine-3'-phosphate
  modified_base 19: mod_base = OTHER; note = 2'-O-methylguanosine-3'-phosphate
  modified_base 20: mod_base = OTHER; note = 2'-O-methyladenosine-3'-phosphate
  modified_base 21: mod_base = OTHER; note = 2'-O-methylcytidine-3'-phosphorothioate
  modified_base 22: mod_base = OTHER; note = 2'-O-methyladenosine-3'-phosphorothioate
  modified_base 23: mod_base = OTHER; note = 2'-O-methylguanosine-3'-phosphate
taatcctgttgtagcctagacag

SEQ ID NO: 3935 - RNA, 23 nt, synthetic construct
  source 1..23: mol_type = other RNA; note = Description of Artificial Sequence: Synthetic oligonucleotide
  modified_base 1: mod_base = OTHER; note = 2'-O-methyladenosine-3'-phosphorothioate
  modified_base 2: mod_base = OTHER; note = 2'-fluoroguanosine-3'-phosphorothioate
  modified_base 3: mod_base = OTHER; note = 2'-O-methyladenosine-3'-phosphate
  modified_base 4: mod_base = OTHER; note = 2'-O-methyladenosine-3'-phosphate
  modified_base 5: mod_base = OTHER; note = 2'-O-methyluridine-3'-phosphate
  modified_base 6: mod_base = OTHER; note = 2'-fluorocytidine-3'-phosphate
  modified_base 7: mod_base = OTHER; note = 2'-O-methylcytidine-3'-phosphate
  modified_base 8: mod_base = OTHER; note = 2'-fluorouridine-3'-phosphate
  modified_base 9: mod_base = OTHER; note = 2'-fluoroguanosine-3'-phosphate
  modified_base 10: mod_base = OTHER; note = 2'-O-methyluridine-3'-phosphate
  modified_base 11: mod_base = OTHER; note = 2'-O-methyluridine-3'-phosphate
  modified_base 12: mod_base = OTHER; note = 2'-O-methylguanosine-3'-phosphate
  modified_base 13: mod_base = OTHER; note = 2'-O-methyluridine-3'-phosphate
  modified_base 14: mod_base = OTHER; note = 2'-fluoroadenosine-3'-phosphate
  modified_base 15: mod_base = OTHER; note = 2'-O-methylguanosine-3'-phosphate
  modified_base 16: mod_base = OTHER; note = 2'-fluorocytidine-3'-phosphate
  modified_base 17: mod_base = OTHER; note = 2'-O-methylcytidine-3'-phosphate
  modified_base 18: mod_base = OTHER; note = 2'-O-methyluridine-3'-phosphate
  modified_base 19: mod_base = OTHER; note = 2'-O-methyladenosine-3'-phosphate
  modified_base 20: mod_base = OTHER; note = 2'-O-methylguanosine-3'-phosphate
  modified_base 21: mod_base = OTHER; note = 2'-O-methyladenosine-3'-phosphorothioate
  modified_base 22: mod_base = OTHER; note = 2'-O-methylcytidine-3'-phosphorothioate
  modified_base 23: mod_base = OTHER; note = 2'-O-methyladenosine-3'-phosphate
agaatcctgttgtagcctagaca

SEQ ID NO: 3936 - RNA, 23 nt, synthetic construct
  source 1..23: mol_type = other RNA; note = Description of Artificial Sequence: Synthetic oligonucleotide
  modified_base 1: mod_base = OTHER; note = 2'-O-methyluridine-3'-phosphorothioate
  modified_base 2: mod_base = OTHER; note = 2'-fluoroadenosine-3'-phosphorothioate
  modified_base 3: mod_base = OTHER; note = 2'-O-methylcytidine-3'-phosphate
  modified_base 4: mod_base = OTHER; note = 2'-O-methyladenosine-3'-phosphate
  modified_base 5: mod_base = OTHER; note = 2'-O-methyladenosine-3'-phosphate
  modified_base 6: mod_base = OTHER; note = 2'-fluorocytidine-3'-phosphate
  modified_base 7: mod_base = OTHER; note = 2'-O-methyladenosine-3'-phosphate
  modified_base 8: mod_base = OTHER; note = 2'-fluorouridine-3'-phosphate
  modified_base 9: mod_base = OTHER; note = 2'-fluoroguanosine-3'-phosphate
  modified_base 10: mod_base = OTHER; note = 2'-O-methylcytidine-3'-phosphate
  modified_base 11: mod_base = OTHER; note = 2'-O-methyladenosine-3'-phosphate
  modified_base 12: mod_base = OTHER; note = 2'-O-methylcytidine-3'-phosphate
  modified_base 13: mod_base = OTHER; note = 2'-O-methyladenosine-3'-phosphate
  modified_base 14: mod_base = OTHER; note = 2'-fluoroadenosine-3'-phosphate
  modified_base 15: mod_base = OTHER; note = 2'-O-methylcytidine-3'-phosphate
  modified_base 16: mod_base = OTHER; note = 2'-fluorocytidine-3'-phosphate
  modified_base 17: mod_base = OTHER; note = 2'-O-methyluridine-3'-phosphate
  modified_base 18: mod_base = OTHER; note = 2'-O-methylcytidine-3'-phosphate
  modified_base 19: mod_base = OTHER; note = 2'-O-methylcytidine-3'-phosphate
  modified_base 20: mod_base = OTHER; note = 2'-O-methyladenosine-3'-phosphate
  modified_base 21: mod_base = OTHER; note = 2'-O-methylcytidine-3'-phosphorothioate
  modified_base 22: mod_base = OTHER; note = 2'-O-methylcytidine-3'-phosphorothioate
  modified_base 23: mod_base = OTHER; note = 2'-O-methyluridine-3'-phosphate
tacaacatgcacaacctccacct

SEQ ID NO: 3937 - RNA, 23 nt, synthetic construct
  source 1..23: mol_type = other RNA; note = Description of Artificial Sequence: Synthetic oligonucleotide
  modified_base 1: mod_base = OTHER; note = 2'-O-methyluridine-3'-phosphorothioate
  modified_base 2: mod_base = OTHER; note = 2'-fluorocytidine-3'-phosphorothioate
  modified_base 3: mod_base = OTHER; note = 2'-O-methyluridine-3'-phosphate
  modified_base 4: mod_base = OTHER; note = 2'-O-methyluridine-3'-phosphate
  modified_base 5: mod_base = OTHER; note = 2'-O-methyluridine-3'-phosphate
  modified_base 6: mod_base = OTHER; note = 2'-fluoroguanosine-3'-phosphate
  modified_base 7: mod_base = OTHER; note = 2'-O-methyladenosine-3'-phosphate
  modified_base 8: mod_base = OTHER; note = 2'-fluoroguanosine-3'-phosphate
  modified_base 9: mod_base = OTHER; note = 2'-fluorouridine-3'-phosphate
  modified_base 10: mod_base = OTHER; note = 2'-O-methyluridine-3'-phosphate
  modified_base 11: mod_base = OTHER; note = 2'-O-methyluridine-3'-phosphate
  modified_base 12: mod_base = OTHER; note = 2'-O-methylguanosine-3'-phosphate
  modified_base 13: mod_base = OTHER; note = 2'-O-methyladenosine-3'-phosphate
  modified_base 14: mod_base = OTHER; note = 2'-fluorouridine-3'-phosphate
  modified_base 15: mod_base = OTHER; note = 2'-O-methylcytidine-3'-phosphate
  modified_base 16: mod_base = OTHER; note = 2'-fluoroadenosine-3'-phosphate
  modified_base 17: mod_base = OTHER; note = 2'-O-methylcytidine-3'-phosphate
  modified_base 18: mod_base = OTHER; note = 2'-O-methylcytidine-3'-phosphate
  modified_base 19: mod_base = OTHER; note = 2'-O-methyluridine-3'-phosphate
  modified_base 20: mod_base = OTHER; note = 2'-O-methylcytidine-3'-phosphate
  modified_base 21: mod_base = OTHER; note = 2'-O-methyladenosine-3'-phosphorothioate
  modified_base 22: mod_base = OTHER; note = 2'-O-methyluridine-3'-phosphorothioate
  modified_base 23: mod_base = OTHER; note = 2'-O-methyladenosine-3'-phosphate
tctttgagtttgatcacctcata

SEQ ID NO: 3938 - RNA, 23 nt, synthetic construct
  source 1..23: mol_type = other RNA; note = Description of Artificial Sequence: Synthetic oligonucleotide
  modified_base 1: mod_base = OTHER; note = 2'-O-methyluridine-3'-phosphorothioate
  modified_base 2: mod_base = OTHER; note = 2'-fluorouridine -3'-phosphorothioate
  modified_base 3: mod_base = OTHER; note = 2'-O-methyladenosine-3'-phosphate
  modified_base 4: mod_base = OTHER; note = 2'-O-methylguanosine-3'-phosphate
  modified_base 5: mod_base = OTHER; note = 2'-O-methylcytidine-3'-phosphate
  modified_base 6: mod_base = OTHER; note = 2'-fluorocytidine-3'-phosphate
  modified_base 7: mod_base = OTHER; note = 2'-O-methyluridine-3'-phosphate
  modified_base 8: mod_base = OTHER; note = 2'-fluorouridine-3'-phosphate
  modified_base 9: mod_base = OTHER; note = 2'-fluorouridine-3'-phosphate
  modified_base 10: mod_base = OTHER; note = 2'-O-methylguanosine-3'-phosphate
  modified_base 11: mod_base = OTHER; note = 2'-O-methyladenosine-3'-phosphate
  modified_base 12: mod_base = OTHER; note = 2'-O-methylguanosine-3'-phosphate
  modified_base 13: mod_base = OTHER; note = 2'-O-methyluridine-3'-phosphate
  modified_base 14: mod_base = OTHER; note = 2'-fluorouridine-3'-phosphate
  modified_base 15: mod_base = OTHER; note = 2'-O-methyluridine-3'-phosphate
  modified_base 16: mod_base = OTHER; note = 2'-fluoroguanosine-3'-phosphate
  modified_base 17: mod_base = OTHER; note = 2'-O-methyladenosine-3'-phosphate
  modified_base 18: mod_base = OTHER; note = 2'-O-methyluridine-3'-phosphate
  modified_base 19: mod_base = OTHER; note = 2'-O-methylcytidine-3'-phosphate
  modified_base 20: mod_base = OTHER; note = 2'-O-methyladenosine-3'-phosphate
  modified_base 21: mod_base = OTHER; note = 2'-O-methylcytidine-3'-phosphorothioate
  modified_base 22: mod_base = OTHER; note = 2'-O-methylcytidine-3'-phosphorothioate
  modified_base 23: mod_base = OTHER; note = 2'-O-methyluridine-3'-phosphate
ttagcctttgagtttgatcacct

SEQ ID NO: 3939 - RNA, 23 nt, synthetic construct
  source 1..23: mol_type = other RNA; note = Description of Artificial Sequence: Synthetic oligonucleotide
  modified_base 1: mod_base = OTHER; note = 2'-O-methyluridine-3'-phosphorothioate
  modified_base 2: mod_base = OTHER; note = 2'-fluorouridine -3'-phosphorothioate
  modified_base 3: mod_base = OTHER; note = 2'-O-methylcytidine-3'-phosphate
  modified_base 4: mod_base = OTHER; note = 2'-O-methyladenosine-3'-phosphate
  modified_base 5: mod_base = OTHER; note = 2'-O-methyladenosine-3'-phosphate
  modified_base 6: mod_base = OTHER; note = 2'-fluoroadenosine-3'-phosphate
  modified_base 7: mod_base = OTHER; note = 2'-O-methylcytidine-3'-phosphate
  modified_base 8: mod_base = OTHER; note = 2'-fluoroguanosine-3'-phosphate
  modified_base 9: mod_base = OTHER; note = 2'-fluoroguanosine-3'-phosphate
  modified_base 10: mod_base = OTHER; note = 2'-O-methylguanosine-3'-phosphate
  modified_base 11: mod_base = OTHER; note = 2'-O-methylcytidine-3'-phosphate
  modified_base 12: mod_base = OTHER; note = 2'-O-methylcytidine-3'-phosphate
  modified_base 13: mod_base = OTHER; note = 2'-O-methyluridine-3'-phosphate
  modified_base 14: mod_base = OTHER; note = 2'-fluorocytidine-3'-phosphate
  modified_base 15: mod_base = OTHER; note = 2'-O-methyluridine-3'-phosphate
  modified_base 16: mod_base = OTHER; note = 2'-fluorouridine-3'-phosphate
  modified_base 17: mod_base = OTHER; note = 2'-O-methylcytidine-3'-phosphate
  modified_base 18: mod_base = OTHER; note = 2'-O-methylcytidine-3'-phosphate
  modified_base 19: mod_base = OTHER; note = 2'-O-methyluridine-3'-phosphate
  modified_base 20: mod_base = OTHER; note = 2'-O-methylcytidine-3'-phosphate
  modified_base 21: mod_base = OTHER; note = 2'-O-methyladenosine-3'-phosphorothioate
  modified_base 22: mod_base = OTHER; note = 2'-O-methylguanosine-3'-phosphorothioate
  modified_base 23: mod_base = OTHER; note = 2'-O-methyladenosine-3'-phosphate
ttcaaacgggcctcttcctcaga

SEQ ID NO: 3940 - RNA, 23 nt, synthetic construct
  source 1..23: mol_type = other RNA; note = Description of Artificial Sequence: Synthetic oligonucleotide
  modified_base 1: mod_base = OTHER; note = 2'-O-methyluridine-3'-phosphorothioate
  modified_base 2: mod_base = OTHER; note = 2'-fluoroadenosine-3'-phosphorothioate
  modified_base 3: mod_base = OTHER; note = 2'-O-methylcytidine-3'-phosphate
  modified_base 4: mod_base = OTHER; note = 2'-O-methyluridine-3'-phosphate
  modified_base 5: mod_base = OTHER; note = 2'-O-methylcytidine-3'-phosphate
  modified_base 6: mod_base = OTHER; note = 2'-fluorouridine-3'-phosphate
  modified_base 7: mod_base = OTHER; note = 2'-O-methylcytidine-3'-phosphate
  modified_base 8: mod_base = OTHER; note = 2'-fluoroadenosine-3'-phosphate
  modified_base 9: mod_base = OTHER; note = 2'-fluoroadenosine-3'-phosphate
  modified_base 10: mod_base = OTHER; note = 2'-O-methylcytidine-3'-phosphate
  modified_base 11: mod_base = OTHER; note = 2'-O-methylcytidine-3'-phosphate
  modified_base 12: mod_base = OTHER; note = 2'-O-methyladenosine-3'-phosphate
  modified_base 13: mod_base = OTHER; note = 2'-O-methylcytidine-3'-phosphate
  modified_base 14: mod_base = OTHER; note = 2'-fluorocytidine-3'-phosphate
  modified_base 15: mod_base = OTHER; note = 2'-O-methyluridine-3'-phosphate
  modified_base 16: mod_base = OTHER; note = 2'-fluoroguanosine-3'-phosphate
  modified_base 17: mod_base = OTHER; note = 2'-O-methylcytidine-3'-phosphate
  modified_base 18: mod_base = OTHER; note = 2'-O-methyluridine-3'-phosphate
  modified_base 19: mod_base = OTHER; note = 2'-O-methyluridine-3'-phosphate
  modified_base 20: mod_base = OTHER; note = 2'-O-methylguanosine-3'-phosphate
  modified_base 21: mod_base = OTHER; note = 2'-O-methyluridine-3'-phosphorothioate
  modified_base 22: mod_base = OTHER; note = 2'-O-methylguanosine-3'-phosphorothioate
  modified_base 23: mod_base = OTHER; note = 2'-O-methyladenosine-3'-phosphate
tactctcaaccacctgcttgtga

SEQ ID NO: 3941 - RNA, 23 nt, synthetic construct
  source 1..23: mol_type = other RNA; note = Description of Artificial Sequence: Synthetic oligonucleotide
  modified_base 1: mod_base = OTHER; note = 2'-O-methyluridine-3'-phosphorothioate
  modified_base 2: mod_base = OTHER; note = 2'-fluorouridine -3'-phosphorothioate
  modified_base 3: mod_base = OTHER; note = 2'-O-methyladenosine-3'-phosphate
  modified_base 4: mod_base = OTHER; note = 2'-O-methyluridine-3'-phosphate
  modified_base 5: mod_base = OTHER; note = 2'-O-methyladenosine-3'-phosphate
  modified_base 6: mod_base = OTHER; note = 2'-fluorocytidine-3'-phosphate
  modified_base 7: mod_base = OTHER; note = 2'-O-methyluridine-3'-phosphate
  modified_base 8: mod_base = OTHER; note = 2'-fluorocytidine-3'-phosphate
  modified_base 9: mod_base = OTHER; note = 2'-fluorouridine-3'-phosphate
  modified_base 10: mod_base = OTHER; note = 2'-O-methylcytidine-3'-phosphate
  modified_base 11: mod_base = OTHER; note = 2'-O-methyluridine-3'-phosphate
  modified_base 12: mod_base = OTHER; note = 2'-O-methylguanosine-3'-phosphate
  modified_base 13: mod_base = OTHER; note = 2'-O-methylcytidine-3'-phosphate
  modified_base 14: mod_base = OTHER; note = 2'-fluorocytidine-3'-phosphate
  modified_base 15: mod_base = OTHER; note = 2'-O-methyladenosine-3'-phosphate
  modified_base 16: mod_base = OTHER; note = 2'-fluoroadenosine-3'-phosphate
  modified_base 17: mod_base = OTHER; note = 2'-O-methyladenosine-3'-phosphate
  modified_base 18: mod_base = OTHER; note = 2'-O-methyluridine-3'-phosphate
  modified_base 19: mod_base = OTHER; note = 2'-O-methylcytidine-3'-phosphate
  modified_base 20: mod_base = OTHER; note = 2'-O-methyluridine-3'-phosphate
  modified_base 21: mod_base = OTHER; note = 2'-O-methylguanosine-3'-phosphorothioate
  modified_base 22: mod_base = OTHER; note = 2'-O-methylcytidine-3'-phosphorothioate
  modified_base 23: mod_base = OTHER; note = 2'-O-methyluridine-3'-phosphate
ttatactctctgccaaatctgct

SEQ ID NO: 3942 - RNA, 23 nt, synthetic construct
  source 1..23: mol_type = other RNA; note = Description of Artificial Sequence: Synthetic oligonucleotide
  modified_base 1: mod_base = OTHER; note = 2'-O-methylguanosine-3'-phosphorothioate
  modified_base 2: mod_base = OTHER; note = 2'-fluorouridine -3'-phosphorothioate
  modified_base 3: mod_base = OTHER; note = 2'-O-methyluridine-3'-phosphate
  modified_base 4: mod_base = OTHER; note = 2'-O-methyluridine-3'-phosphate
  modified_base 5: mod_base = OTHER; note = 2'-O-methylguanosine-3'-phosphate
  modified_base 6: mod_base = OTHER; note = 2'-fluoroadenosine-3'-phosphate
  modified_base 7: mod_base = OTHER; note = 2'-O-methyluridine-3'-phosphate
  modified_base 8: mod_base = OTHER; note = 2'-fluorocytidine-3'-phosphate
  modified_base 9: mod_base = OTHER; note = 2'-fluoroadenosine-3'-phosphate
  modified_base 10: mod_base = OTHER; note = 2'-O-methylcytidine-3'-phosphate
  modified_base 11: mod_base = OTHER; note = 2'-O-methylcytidine-3'-phosphate
  modified_base 12: mod_base = OTHER; note = 2'-O-methyluridine-3'-phosphate
  modified_base 13: mod_base = OTHER; note = 2'-O-methylcytidine-3'-phosphate
  modified_base 14: mod_base = OTHER; note = 2'-fluoroadenosine-3'-phosphate
  modified_base 15: mod_base = OTHER; note = 2'-O-methyluridine-3'-phosphate
  modified_base 16: mod_base = OTHER; note = 2'-fluoroadenosine-3'-phosphate
  modified_base 17: mod_base = OTHER; note = 2'-O-methyladenosine-3'-phosphate
  modified_base 18: mod_base = OTHER; note = 2'-O-methylguanosine-3'-phosphate
  modified_base 19: mod_base = OTHER; note = 2'-O-methylcytidine-3'-phosphate
  modified_base 20: mod_base = OTHER; note = 2'-O-methyladenosine-3'-phosphate
  modified_base 21: mod_base = OTHER; note = 2'-O-methylcytidine-3'-phosphorothioate
  modified_base 22: mod_base = OTHER; note = 2'-O-methyluridine-3'-phosphorothioate
  modified_base 23: mod_base = OTHER; note = 2'-O-methylcytidine-3'-phosphate
gtttgatcacctcataagcactc

SEQ ID NO: 3943 - RNA, 23 nt, synthetic construct
  source 1..23: mol_type = other RNA; note = Description of Artificial Sequence: Synthetic oligonucleotide
  modified_base 1: mod_base = OTHER; note = 2'-O-methyladenosine-3'-phosphorothioate
  modified_base 2: mod_base = OTHER; note = 2'-fluorouridine -3'-phosphorothioate
  modified_base 3: mod_base = OTHER; note = 2'-O-methyladenosine-3'-phosphate
  modified_base 4: mod_base = OTHER; note = 2'-O-methylcytidine-3'-phosphate
  modified_base 5: mod_base = OTHER; note = 2'-O-methyluridine-3'-phosphate
  modified_base 6: mod_base = OTHER; note = 2'-fluorocytidine-3'-phosphate
  modified_base 7: mod_base = OTHER; note = 2'-O-methyluridine-3'-phosphate
  modified_base 8: mod_base = OTHER; note = 2'-fluorocytidine-3'-phosphate
  modified_base 9: mod_base = OTHER; note = 2'-fluorouridine-3'-phosphate
  modified_base 10: mod_base = OTHER; note = 2'-O-methylguanosine-3'-phosphate
  modified_base 11: mod_base = OTHER; note = 2'-O-methylcytidine-3'-phosphate
  modified_base 12: mod_base = OTHER; note = 2'-O-methylcytidine-3'-phosphate
  modified_base 13: mod_base = OTHER; note = 2'-O-methyladenosine-3'-phosphate
  modified_base 14: mod_base = OTHER; note = 2'-fluoroadenosine-3'-phosphate
  modified_base 15: mod_base = OTHER; note = 2'-O-methyladenosine-3'-phosphate
  modified_base 16: mod_base = OTHER; note = 2'-fluorouridine-3'-phosphate
  modified_base 17: mod_base = OTHER; note = 2'-O-methylcytidine-3'-phosphate
  modified_base 18: mod_base = OTHER; note = 2'-O-methyluridine-3'-phosphate
  modified_base 19: mod_base = OTHER; note = 2'-O-methylguanosine-3'-phosphate
  modified_base 20: mod_base = OTHER; note = 2'-O-methylcytidine-3'-phosphate
  modified_base 21: mod_base = OTHER; note = 2'-O-methyluridine-3'-phosphorothioate
  modified_base 22: mod_base = OTHER; note = 2'-O-methyladenosine-3'-phosphorothioate
  modified_base 23: mod_base = OTHER; note = 2'-O-methylcytidine-3'-phosphate
atactctctgccaaatctgctac

SEQ ID NO: 3944 - RNA, 23 nt, synthetic construct
  source 1..23: mol_type = other RNA; note = Description of Artificial Sequence: Synthetic oligonucleotide
  modified_base 1: mod_base = OTHER; note = 2'-O-methyluridine-3'-phosphorothioate
  modified_base 2: mod_base = OTHER; note = 2'-fluorocytidine-3'-phosphorothioate
  modified_base 3: mod_base = OTHER; note = 2'-O-methyladenosine-3'-phosphate
  modified_base 4: mod_base = OTHER; note = 2'-O-methyluridine-3'-phosphate
  modified_base 5: mod_base = OTHER; note = 2'-O-methyluridine-3'-phosphate
  modified_base 6: mod_base = OTHER; note = 2'-fluoroadenosine-3'-phosphate
  modified_base 7: mod_base = OTHER; note = 2'-O-methyluridine-3'-phosphate
  modified_base 8: mod_base = OTHER; note = 2'-fluoroadenosine-3'-phosphate
  modified_base 9: mod_base = OTHER; note = 2'-fluorocytidine-3'-phosphate
  modified_base 10: mod_base = OTHER; note = 2'-O-methyluridine-3'-phosphate
  modified_base 11: mod_base = OTHER; note = 2'-O-methylcytidine-3'-phosphate
  modified_base 12: mod_base = OTHER; note = 2'-O-methyluridine-3'-phosphate
  modified_base 13: mod_base = OTHER; note = 2'-O-methylcytidine-3'-phosphate
  modified_base 14: mod_base = OTHER; note = 2'-fluorouridine-3'-phosphate
  modified_base 15: mod_base = OTHER; note = 2'-O-methylguanosine-3'-phosphate
  modified_base 16: mod_base = OTHER; note = 2'-fluorocytidine-3'-phosphate
  modified_base 17: mod_base = OTHER; note = 2'-O-methylcytidine-3'-phosphate
  modified_base 18: mod_base = OTHER; note = 2'-O-methyladenosine-3'-phosphate
  modified_base 19: mod_base = OTHER; note = 2'-O-methyladenosine-3'-phosphate
  modified_base 20: mod_base = OTHER; note = 2'-O-methyladenosine-3'-phosphate
  modified_base 21: mod_base = OTHER; note = 2'-O-methyluridine-3'-phosphorothioate
  modified_base 22: mod_base = OTHER; note = 2'-O-methylcytidine-3'-phosphorothioate
  modified_base 23: mod_base = OTHER; note = 2'-O-methyluridine-3'-phosphate
tcattatactctctgccaaatct

SEQ ID NO: 3945 - RNA, 23 nt, synthetic construct
  source 1..23: mol_type = other RNA; note = Description of Artificial Sequence: Synthetic oligonucleotide
  modified_base 1: mod_base = OTHER; note = 2'-O-methyluridine-3'-phosphorothioate
  modified_base 2: mod_base = OTHER; note = 2'-fluorouridine -3'-phosphorothioate
  modified_base 3: mod_base = OTHER; note = 2'-O-methylcytidine-3'-phosphate
  modified_base 4: mod_base = OTHER; note = 2'-O-methyladenosine-3'-phosphate
  modified_base 5: mod_base = OTHER; note = 2'-O-methyluridine-3'-phosphate
  modified_base 6: mod_base = OTHER; note = 2'-fluorouridine-3'-phosphate
  modified_base 7: mod_base = OTHER; note = 2'-O-methyladenosine-3'-phosphate
  modified_base 8: mod_base = OTHER; note = 2'-fluorouridine-3'-phosphate
  modified_base 9: mod_base = OTHER; note = 2'-fluoroadenosine-3'-phosphate
  modified_base 10: mod_base = OTHER; note = 2'-O-methylcytidine-3'-phosphate
  modified_base 11: mod_base = OTHER; note = 2'-O-methyluridine-3'-phosphate
  modified_base 12: mod_base = OTHER; note = 2'-O-methylcytidine-3'-phosphate
  modified_base 13: mod_base = OTHER; note = 2'-O-methyluridine-3'-phosphate
  modified_base 14: mod_base = OTHER; note = 2'-fluorocytidine-3'-phosphate
  modified_base 15: mod_base = OTHER; note = 2'-O-methyluridine-3'-phosphate
  modified_base 16: mod_base = OTHER; note = 2'-fluoroguanosine-3'-phosphate
  modified_base 17: mod_base = OTHER; note = 2'-O-methylcytidine-3'-phosphate
  modified_base 18: mod_base = OTHER; note = 2'-O-methylcytidine-3'-phosphate
  modified_base 19: mod_base = OTHER; note = 2'-O-methyladenosine-3'-phosphate
  modified_base 20: mod_base = OTHER; note = 2'-O-methyladenosine-3'-phosphate
  modified_base 21: mod_base = OTHER; note = 2'-O-methyladenosine-3'-phosphorothioate
  modified_base 22: mod_base = OTHER; note = 2'-O-methyluridine-3'-phosphorothioate
  modified_base 23: mod_base = OTHER; note = 2'-O-methylcytidine-3'-phosphate
ttcattatactctctgccaaatc

SEQ ID NO: 3946 - RNA, 23 nt, synthetic construct
  source 1..23: mol_type = other RNA; note = Description of Artificial Sequence: Synthetic oligonucleotide
  modified_base 1: mod_base = OTHER; note = 2'-O-methyluridine-3'-phosphorothioate
  modified_base 2: mod_base = OTHER; note = 2'-fluoroadenosine-3'-phosphorothioate
  modified_base 3: mod_base = OTHER; note = 2'-O-methyluridine-3'-phosphate
  modified_base 4: mod_base = OTHER; note = 2'-O-methyluridine-3'-phosphate
  modified_base 5: mod_base = OTHER; note = 2'-O-methylcytidine-3'-phosphate
  modified_base 6: mod_base = OTHER; note = 2'-fluorouridine-3'-phosphate
  modified_base 7: mod_base = OTHER; note = 2'-O-methylguanosine-3'-phosphate
  modified_base 8: mod_base = OTHER; note = 2'-fluorouridine-3'-phosphate
  modified_base 9: mod_base = OTHER; note = 2'-fluorocytidine-3'-phosphate
  modified_base 10: mod_base = OTHER; note = 2'-O-methylcytidine-3'-phosphate
  modified_base 11: mod_base = OTHER; note = 2'-O-methylcytidine-3'-phosphate
  modified_base 12: mod_base = OTHER; note = 2'-O-methyladenosine-3'-phosphate
  modified_base 13: mod_base = OTHER; note = 2'-O-methyladenosine-3'-phosphate
  modified_base 14: mod_base = OTHER; note = 2'-fluoroadenosine-3'-phosphate
  modified_base 15: mod_base = OTHER; note = 2'-O-methyladenosine-3'-phosphate
  modified_base 16: mod_base = OTHER; note = 2'-fluorouridine-3'-phosphate
  modified_base 17: mod_base = OTHER; note = 2'-O-methylguanosine-3'-phosphate
  modified_base 18: mod_base = OTHER; note = 2'-O-methylcytidine-3'-phosphate
  modified_base 19: mod_base = OTHER; note = 2'-O-methyladenosine-3'-phosphate
  modified_base 20: mod_base = OTHER; note = 2'-O-methyladenosine-3'-phosphate
  modified_base 21: mod_base = OTHER; note = 2'-O-methylguanosine-3'-phosphorothioate
  modified_base 22: mod_base = OTHER; note = 2'-O-methylguanosine-3'-phosphorothioate
  modified_base 23: mod_base = OTHER; note = 2'-O-methyladenosine-3'-phosphate
tattctgtcccaaaatgcaagga

SEQ ID NO: 3947 - RNA, 23 nt, synthetic construct
  source 1..23: mol_type = other RNA; note = Description of Artificial Sequence: Synthetic oligonucleotide
  modified_base 1: mod_base = OTHER; note = 2'-O-methyluridine-3'-phosphorothioate
  modified_base 2: mod_base = OTHER; note = 2'-fluorocytidine-3'-phosphorothioate
  modified_base 3: mod_base = OTHER; note = 2'-O-methyladenosine-3'-phosphate
  modified_base 4: mod_base = OTHER; note = 2'-O-methylcytidine-3'-phosphate
  modified_base 5: mod_base = OTHER; note = 2'-O-methyladenosine-3'-phosphate
  modified_base 6: mod_base = OTHER; note = 2'-fluoroadenosine-3'-phosphate
  modified_base 7: mod_base = OTHER; note = 2'-O-methylguanosine-3'-phosphate
  modified_base 8: mod_base = OTHER; note = 2'-fluoroguanosine-3'-phosphate
  modified_base 9: mod_base = OTHER; note = 2'-fluorouridine-3'-phosphate
  modified_base 10: mod_base = OTHER; note = 2'-O-methylcytidine-3'-phosphate
  modified_base 11: mod_base = OTHER; note = 2'-O-methyluridine-3'-phosphate
  modified_base 12: mod_base = OTHER; note = 2'-O-methylguanosine-3'-phosphate
  modified_base 13: mod_base = OTHER; note = 2'-O-methyladenosine-3'-phosphate
  modified_base 14: mod_base = OTHER; note = 2'-fluoroguanosine-3'-phosphate
  modified_base 15: mod_base = OTHER; note = 2'-O-methyladenosine-3'-phosphate
  modified_base 16: mod_base = OTHER; note = 2'-fluorouridine-3'-phosphate
  modified_base 17: mod_base = OTHER; note = 2'-O-methyluridine-3'-phosphate
  modified_base 18: mod_base = OTHER; note = 2'-O-methylcytidine-3'-phosphate
  modified_base 19: mod_base = OTHER; note = 2'-O-methylcytidine-3'-phosphate
  modified_base 20: mod_base = OTHER; note = 2'-O-methyladenosine-3'-phosphate
  modified_base 21: mod_base = OTHER; note = 2'-O-methyluridine-3'-phosphorothioate
  modified_base 22: mod_base = OTHER; note = 2'-O-methyluridine-3'-phosphorothioate
  modified_base 23: mod_base = OTHER; note = 2'-O-methylcytidine-3'-phosphate
tcacaaggtctgagattccattc

SEQ ID NO: 3948 - RNA, 23 nt, synthetic construct
  source 1..23: mol_type = other RNA; note = Description of Artificial Sequence: Synthetic oligonucleotide
  modified_base 1: mod_base = OTHER; note = 2'-O-methyluridine-3'-phosphorothioate
  modified_base 2: mod_base = OTHER; note = 2'-fluoroadenosine-3'-phosphorothioate
  modified_base 3: mod_base = OTHER; note = 2'-O-methylguanosine-3'-phosphate
  modified_base 4: mod_base = OTHER; note = 2'-O-methylcytidine-3'-phosphate
  modified_base 5: mod_base = OTHER; note = 2'-O-methyladenosine-3'-phosphate
  modified_base 6: mod_base = OTHER; note = 2'-fluorouridine-3'-phosphate
  modified_base 7: mod_base = OTHER; note = 2'-O-methylcytidine-3'-phosphate
  modified_base 8: mod_base = OTHER; note = 2'-fluoroadenosine-3'-phosphate
  modified_base 9: mod_base = OTHER; note = 2'-fluoroguanosine-3'-phosphate
  modified_base 10: mod_base = OTHER; note = 2'-O-methylguanosine-3'-phosphate
  modified_base 11: mod_base = OTHER; note = 2'-O-methyladenosine-3'-phosphate
  modified_base 12: mod_base = OTHER; note = 2'-O-methyluridine-3'-phosphate
  modified_base 13: mod_base = OTHER; note = 2'-O-methyladenosine-3'-phosphate
  modified_base 14: mod_base = OTHER; note = 2'-fluorouridine-3'-phosphate
  modified_base 15: mod_base = OTHER; note = 2'-O-methyladenosine-3'-phosphate
  modified_base 16: mod_base = OTHER; note = 2'-fluoroguanosine-3'-phosphate
  modified_base 17: mod_base = OTHER; note = 2'-O-methylcytidine-3'-phosphate
  modified_base 18: mod_base = OTHER; note = 2'-O-methyluridine-3'-phosphate
  modified_base 19: mod_base = OTHER; note = 2'-O-methylguanosine-3'-phosphate
  modified_base 20: mod_base = OTHER; note = 2'-O-methyluridine-3'-phosphate
  modified_base 21: mod_base = OTHER; note = 2'-O-methylguanosine-3'-phosphorothioate
  modified_base 22: mod_base = OTHER; note = 2'-O-methylguanosine-3'-phosphorothioate
  modified_base 23: mod_base = OTHER; note = 2'-O-methyladenosine-3'-phosphate
tagcatcaggatatagctgtgga

SEQ ID NO: 3949 - RNA, 23 nt, synthetic construct
  source 1..23: mol_type = other RNA; note = Description of Artificial Sequence: Synthetic oligonucleotide
  modified_base 1: mod_base = OTHER; note = 2'-O-methyluridine-3'-phosphorothioate
  modified_base 2: mod_base = OTHER; note = 2'-fluorouridine -3'-phosphorothioate
  modified_base 3: mod_base = OTHER; note = 2'-O-methyluridine-3'-phosphate
  modified_base 4: mod_base = OTHER; note = 2'-O-methylcytidine-3'-phosphate
  modified_base 5: mod_base = OTHER; note = 2'-O-methyladenosine-3'-phosphate
  modified_base 6: mod_base = OTHER; note = 2'-fluoroadenosine-3'-phosphate
  modified_base 7: mod_base = OTHER; note = 2'-O-methyladenosine-3'-phosphate
  modified_base 8: mod_base = OTHER; note = 2'-fluorocytidine-3'-phosphate
  modified_base 9: mod_base = OTHER; note = 2'-fluoroguanosine-3'-phosphate
  modified_base 10: mod_base = OTHER; note = 2'-O-methylguanosine-3'-phosphate
  modified_base 11: mod_base = OTHER; note = 2'-O-methylguanosine-3'-phosphate
  modified_base 12: mod_base = OTHER; note = 2'-O-methylcytidine-3'-phosphate
  modified_base 13: mod_base = OTHER; note = 2'-O-methylcytidine-3'-phosphate
  modified_base 14: mod_base = OTHER; note = 2'-fluorouridine-3'-phosphate
  modified_base 15: mod_base = OTHER; note = 2'-O-methylcytidine-3'-phosphate
  modified_base 16: mod_base = OTHER; note = 2'-fluorouridine-3'-phosphate
  modified_base 17: mod_base = OTHER; note = 2'-O-methyluridine-3'-phosphate
  modified_base 18: mod_base = OTHER; note = 2'-O-methylcytidine-3'-phosphate
  modified_base 19: mod_base = OTHER; note = 2'-O-methylcytidine-3'-phosphate
  modified_base 20: mod_base = OTHER; note = 2'-O-methyluridine-3'-phosphate
  modified_base 21: mod_base = OTHER; note = 2'-O-methylcytidine-3'-phosphorothioate
  modified_base 22: mod_base = OTHER; note = 2'-O-methyladenosine-3'-phosphorothioate
  modified_base 23: mod_base = OTHER; note = 2'-O-methylguanosine-3'-phosphate
tttcaaacgggcctcttcctcag

SEQ ID NO: 3950 - RNA, 23 nt, synthetic construct
  source 1..23: mol_type = other RNA; note = Description of Artificial Sequence: Synthetic oligonucleotide
  modified_base 1: mod_base = OTHER; note = 2'-O-methyluridine-3'-phosphorothioate
  modified_base 2: mod_base = OTHER; note = 2'-fluoroadenosine-3'-phosphorothioate
  modified_base 3: mod_base = OTHER; note = 2'-O-methyladenosine-3'-phosphate
  modified_base 4: mod_base = OTHER; note = 2'-O-methyladenosine-3'-phosphate
  modified_base 5: mod_base = OTHER; note = 2'-O-methylcytidine-3'-phosphate
  modified_base 6: mod_base = OTHER; note = 2'-fluoroguanosine-3'-phosphate
  modified_base 7: mod_base = OTHER; note = 2'-O-methylguanosine-3'-phosphate
  modified_base 8: mod_base = OTHER; note = 2'-fluoroguanosine-3'-phosphate
  modified_base 9: mod_base = OTHER; note = 2'-fluorocytidine-3'-phosphate
  modified_base 10: mod_base = OTHER; note = 2'-O-methylcytidine-3'-phosphate
  modified_base 11: mod_base = OTHER; note = 2'-O-methyluridine-3'-phosphate
  modified_base 12: mod_base = OTHER; note = 2'-O-methylcytidine-3'-phosphate
  modified_base 13: mod_base = OTHER; note = 2'-O-methyluridine-3'-phosphate
  modified_base 14: mod_base = OTHER; note = 2'-fluorouridine-3'-phosphate
  modified_base 15: mod_base = OTHER; note = 2'-O-methylcytidine-3'-phosphate
  modified_base 16: mod_base = OTHER; note = 2'-fluorocytidine-3'-phosphate
  modified_base 17: mod_base = OTHER; note = 2'-O-methyluridine-3'-phosphate
  modified_base 18: mod_base = OTHER; note = 2'-O-methylcytidine-3'-phosphate
  modified_base 19: mod_base = OTHER; note = 2'-O-methyladenosine-3'-phosphate
  modified_base 20: mod_base = OTHER; note = 2'-O-methylguanosine-3'-phosphate
  modified_base 21: mod_base = OTHER; note = 2'-O-methyladenosine-3'-phosphorothioate
  modified_base 22: mod_base = OTHER; note = 2'-O-methyladenosine-3'-phosphorothioate
  modified_base 23: mod_base = OTHER; note = 2'-O-methylguanosine-3'-phosphate
taaacgggcctcttcctcagaag

SEQ ID NO: 3951 - RNA, 23 nt, synthetic construct
  source 1..23: mol_type = other RNA; note = Description of Artificial Sequence: Synthetic oligonucleotide
  modified_base 1: mod_base = OTHER; note = 2'-O-methyluridine-3'-phosphorothioate
  modified_base 2: mod_base = OTHER; note = 2'-fluoroadenosine-3'-phosphorothioate
  modified_base 3: mod_base = OTHER; note = 2'-O-methylcytidine-3'-phosphate
  modified_base 4: mod_base = OTHER; note = 2'-O-methyladenosine-3'-phosphate
  modified_base 5: mod_base = OTHER; note = 2'-O-methylcytidine-3'-phosphate
  modified_base 6: mod_base = OTHER; note = 2'-fluorouridine-3'-phosphate
  modified_base 7: mod_base = OTHER; note = 2'-O-methylguanosine-3'-phosphate
  modified_base 8: mod_base = OTHER; note = 2'-fluoroguanosine-3'-phosphate
  modified_base 9: mod_base = OTHER; note = 2'-fluoroadenosine-3'-phosphate
  modified_base 10: mod_base = OTHER; note = 2'-O-methyluridine-3'-phosphate
  modified_base 11: mod_base = OTHER; note = 2'-O-methylcytidine-3'-phosphate
  modified_base 12: mod_base = OTHER; note = 2'-O-methylcytidine-3'-phosphate
  modified_base 13: mod_base = OTHER; note = 2'-O-methylcytidine-3'-phosphate
  modified_base 14: mod_base = OTHER; note = 2'-fluoroadenosine-3'-phosphate
  modified_base 15: mod_base = OTHER; note = 2'-O-methylguanosine-3'-phosphate
  modified_base 16: mod_base = OTHER; note = 2'-fluoroguanosine-3'-phosphate
  modified_base 17: mod_base = OTHER; note = 2'-O-methyladenosine-3'-phosphate
  modified_base 18: mod_base = OTHER; note = 2'-O-methyluridine-3'-phosphate
  modified_base 19: mod_base = OTHER; note = 2'-O-methylguanosine-3'-phosphate
  modified_base 20: mod_base = OTHER; note = 2'-O-methyluridine-3'-phosphate
  modified_base 21: mod_base = OTHER; note = 2'-O-methylguanosine-3'-phosphorothioate
  modified_base 22: mod_base = OTHER; note = 2'-O-methyladenosine-3'-phosphorothioate
  modified_base 23: mod_base = OTHER; note = 2'-O-methylcytidine-3'-phosphate
tacactggatcccaggatgtgac

SEQ ID NO: 3952 - RNA, 23 nt, synthetic construct
  source 1..23: mol_type = other RNA; note = Description of Artificial Sequence: Synthetic oligonucleotide
  modified_base 1: mod_base = OTHER; note = 2'-O-methyluridine-3'-phosphorothioate
  modified_base 2: mod_base = OTHER; note = 2'-fluoroguanosine-3'-phosphorothioate
  modified_base 3: mod_base = OTHER; note = 2'-O-methylguanosine-3'-phosphate
  modified_base 4: mod_base = OTHER; note = 2'-O-methyluridine-3'-phosphate
  modified_base 5: mod_base = OTHER; note = 2'-O-methylguanosine-3'-phosphate
  modified_base 6: mod_base = OTHER; note = 2'-fluorouridine-3'-phosphate
  modified_base 7: mod_base = OTHER; note = 2'-O-methyluridine-3'-phosphate
  modified_base 8: mod_base = OTHER; note = 2'-fluorocytidine-3'-phosphate
  modified_base 9: mod_base = OTHER; note = 2'-fluorouridine-3'-phosphate
  modified_base 10: mod_base = OTHER; note = 2'-O-methyladenosine-3'-phosphate
  modified_base 11: mod_base = OTHER; note = 2'-O-methyladenosine-3'-phosphate
  modified_base 12: mod_base = OTHER; note = 2'-O-methylguanosine-3'-phosphate
  modified_base 13: mod_base = OTHER; note = 2'-O-methylguanosine-3'-phosphate
  modified_base 14: mod_base = OTHER; note = 2'-fluoroadenosine-3'-phosphate
  modified_base 15: mod_base = OTHER; note = 2'-O-methyladenosine-3'-phosphate
  modified_base 16: mod_base = OTHER; note = 2'-fluoroadenosine-3'-phosphate
  modified_base 17: mod_base = OTHER; note = 2'-O-methyladenosine-3'-phosphate
  modified_base 18: mod_base = OTHER; note = 2'-O-methylguanosine-3'-phosphate
  modified_base 19: mod_base = OTHER; note = 2'-O-methylguanosine-3'-phosphate
  modified_base 20: mod_base = OTHER; note = 2'-O-methylcytidine-3'-phosphate
  modified_base 21: mod_base = OTHER; note = 2'-O-methyluridine-3'-phosphorothioate
  modified_base 22: mod_base = OTHER; note = 2'-O-methylguanosine-3'-phosphorothioate
  modified_base 23: mod_base = OTHER; note = 2'-O-methylcytidine-3'-phosphate
tggtgttctaaggaaaaggctgc

SEQ ID NO: 3953 - RNA, 23 nt, synthetic construct
  source 1..23: mol_type = other RNA; note = Description of Artificial Sequence: Synthetic oligonucleotide
  modified_base 1: mod_base = OTHER; note = 2'-O-methyluridine-3'-phosphorothioate
  modified_base 2: mod_base = OTHER; note = 2'-fluoroadenosine-3'-phosphorothioate
  modified_base 3: mod_base = OTHER; note = 2'-O-methyluridine-3'-phosphate
  modified_base 4: mod_base = OTHER; note = 2'-O-methyluridine-3'-phosphate
  modified_base 5: mod_base = OTHER; note = 2'-O-methyluridine-3'-phosphate
  modified_base 6: mod_base = OTHER; note = 2'-fluorocytidine-3'-phosphate
  modified_base 7: mod_base = OTHER; note = 2'-O-methyladenosine-3'-phosphate
  modified_base 8: mod_base = OTHER; note = 2'-fluorocytidine-3'-phosphate
  modified_base 9: mod_base = OTHER; note = 2'-fluoroadenosine-3'-phosphate
  modified_base 10: mod_base = OTHER; note = 2'-O-methylcytidine-3'-phosphate
  modified_base 11: mod_base = OTHER; note = 2'-O-methyluridine-3'-phosphate
  modified_base 12: mod_base = OTHER; note = 2'-O-methyladenosine-3'-phosphate
  modified_base 13: mod_base = OTHER; note = 2'-O-methyladenosine-3'-phosphate
  modified_base 14: mod_base = OTHER; note = 2'-fluorocytidine-3'-phosphate
  modified_base 15: mod_base = OTHER; note = 2'-O-methylcytidine-3'-phosphate
  modified_base 16: mod_base = OTHER; note = 2'-fluoroadenosine-3'-phosphate
  modified_base 17: mod_base = OTHER; note = 2'-O-methylguanosine-3'-phosphate
  modified_base 18: mod_base = OTHER; note = 2'-O-methyluridine-3'-phosphate
  modified_base 19: mod_base = OTHER; note = 2'-O-methyluridine-3'-phosphate
  modified_base 20: mod_base = OTHER; note = 2'-O-methylguanosine-3'-phosphate
  modified_base 21: mod_base = OTHER; note = 2'-O-methyladenosine-3'-phosphorothioate
  modified_base 22: mod_base = OTHER; note = 2'-O-methyladenosine-3'-phosphorothioate
  modified_base 23: mod_base = OTHER; note = 2'-O-methylguanosine-3'-phosphate
tatttcacactaaccagttgaag

SEQ ID NO: 3954 - RNA, 23 nt, unidentified
  source 1..23: mol_type = unassigned RNA; note = Description of Unknown: target sequence
tttttatctgatctgtgattaaa

SEQ ID NO: 3955 - RNA, 23 nt, unidentified
  source 1..23: mol_type = unassigned RNA; note = Description of Unknown: target sequence
caactggttagtgtgaaatagtt

SEQ ID NO: 3956 - RNA, 23 nt, unidentified
  source 1..23: mol_type = unassigned RNA; note = Description of Unknown: target sequence
tgaacatgcctagtccaacattt

SEQ ID NO: 3957 - RNA, 23 nt, unidentified
  source 1..23: mol_type = unassigned RNA; note = Description of Unknown: target sequence
tccaagtccaatatggcaactct

SEQ ID NO: 3958 - RNA, 23 nt, unidentified
  source 1..23: mol_type = unassigned RNA; note = Description of Unknown: target sequence
tttccaccatgattaagggtctt

SEQ ID NO: 3959 - RNA, 23 nt, unidentified
  source 1..23: mol_type = unassigned RNA; note = Description of Unknown: target sequence
tatcatttcactgtctaggctac

SEQ ID NO: 3960 - RNA, 23 nt, unidentified
  source 1..23: mol_type = unassigned RNA; note = Description of Unknown: target sequence
gttgtcctttttatctgatctgt

SEQ ID NO: 3961 - RNA, 23 nt, unidentified
  source 1..23: mol_type = unassigned RNA; note = Description of Unknown: target sequence
atccagtgtataaatccaatatc

SEQ ID NO: 3962 - RNA, 23 nt, unidentified
  source 1..23: mol_type = unassigned RNA; note = Description of Unknown: target sequence
tatccaagtgttataccaactaa

SEQ ID NO: 3963 - RNA, 23 nt, unidentified
  source 1..23: mol_type = unassigned RNA; note = Description of Unknown: target sequence
atgtcatcgaagacaaattgaag

SEQ ID NO: 3964 - RNA, 23 nt, unidentified
  source 1..23: mol_type = unassigned RNA; note = Description of Unknown: target sequence
tagaacaccaaagattgtctctg

SEQ ID NO: 3965 - RNA, 23 nt, unidentified
  source 1..23: mol_type = unassigned RNA; note = Description of Unknown: target sequence
agaacaccaaagattgtctctgg

SEQ ID NO: 3966 - RNA, 23 nt, unidentified
  source 1..23: mol_type = unassigned RNA; note = Description of Unknown: target sequence
gcatgttgtcctttttatctgat

SEQ ID NO: 3967 - RNA, 23 nt, unidentified
  source 1..23: mol_type = unassigned RNA; note = Description of Unknown: target sequence
catcaactcctgaagttagaaat

SEQ ID NO: 3968 - RNA, 23 nt, unidentified
  source 1..23: mol_type = unassigned RNA; note = Description of Unknown: target sequence
ccaactatccaagtgttatacca

SEQ ID NO: 3969 - RNA, 23 nt, unidentified
  source 1..23: mol_type = unassigned RNA; note = Description of Unknown: target sequence
tttccttagaacaccaaagattg

SEQ ID NO: 3970 - RNA, 23 nt, unidentified
  source 1..23: mol_type = unassigned RNA; note = Description of Unknown: target sequence
atggtattaatcttgtgtagtct

SEQ ID NO: 3971 - RNA, 23 nt, unidentified
  source 1..23: mol_type = unassigned RNA; note = Description of Unknown: target sequence
ctggctccttcactgaacatgcc

SEQ ID NO: 3972 - RNA, 23 nt, unidentified
  source 1..23: mol_type = unassigned RNA; note = Description of Unknown: target sequence
tatatcagtagtgtacattacca

SEQ ID NO: 3973 - RNA, 23 nt, unidentified
  source 1..23: mol_type = unassigned RNA; note = Description of Unknown: target sequence
ggcagccttttccttagaacacc

SEQ ID NO: 3974 - RNA, 23 nt, unidentified
  source 1..23: mol_type = unassigned RNA; note = Description of Unknown: target sequence
aactggttagtgtgaaatagttc

SEQ ID NO: 3975 - RNA, 23 nt, unidentified
  source 1..23: mol_type = unassigned RNA; note = Description of Unknown: target sequence
gaactatatcagtagtgtacatt

SEQ ID NO: 3976 - RNA, 23 nt, unidentified
  source 1..23: mol_type = unassigned RNA; note = Description of Unknown: target sequence
actatatcagtagtgtacattac

SEQ ID NO: 3977 - RNA, 23 nt, unidentified
  source 1..23: mol_type = unassigned RNA; note = Description of Unknown: target sequence
cagtaatattttaagatggactg

SEQ ID NO: 3978 - RNA, 23 nt, unidentified
  source 1..23: mol_type = unassigned RNA; note = Description of Unknown: target sequence
tattttaagatggactgggaaaa

SEQ ID NO: 3979 - RNA, 23 nt, unidentified
  source 1..23: mol_type = unassigned RNA; note = Description of Unknown: target sequence
actggttagtgtgaaatagttct

SEQ ID NO: 3980 - RNA, 23 nt, unidentified
  source 1..23: mol_type = unassigned RNA; note = Description of Unknown: target sequence
ccttcactgaacatgcctagtcc

SEQ ID NO: 3981 - RNA, 23 nt, unidentified
  source 1..23: mol_type = unassigned RNA; note = Description of Unknown: target sequence
caaccaactatccaagtgttata

SEQ ID NO: 3982 - RNA, 23 nt, unidentified
  source 1..23: mol_type = unassigned RNA; note = Description of Unknown: target sequence
atccaagtgttataccaactaaa

SEQ ID NO: 3983 - RNA, 23 nt, unidentified
  source 1..23: mol_type = unassigned RNA; note = Description of Unknown: target sequence
gattccttttggttccaagtcca

SEQ ID NO: 3984 - RNA, 23 nt, unidentified
  source 1..23: mol_type = unassigned RNA; note = Description of Unknown: target sequence
tggcagccttttccttagaacac

SEQ ID NO: 3985 - RNA, 23 nt, unidentified
  source 1..23: mol_type = unassigned RNA; note = Description of Unknown: target sequence
gcagtaatattttaagatggact

SEQ ID NO: 3986 - RNA, 23 nt, unidentified
  source 1..23: mol_type = unassigned RNA; note = Description of Unknown: target sequence
gtaaaatccacagctatatcctg

SEQ ID NO: 3987 - RNA, 23 nt, unidentified
  source 1..23: mol_type = unassigned RNA; note = Description of Unknown: target sequence
gctccttcactgaacatgcctag

SEQ ID NO: 3988 - RNA, 23 nt, unidentified
  source 1..23: mol_type = unassigned RNA; note = Description of Unknown: target sequence
ttcactgaacatgcctagtccaa

SEQ ID NO: 3989 - RNA, 23 nt, unidentified
  source 1..23: mol_type = unassigned RNA; note = Description of Unknown: target sequence
ccaagtgttataccaactaaaac

SEQ ID NO: 3990 - RNA, 23 nt, unidentified
  source 1..23: mol_type = unassigned RNA; note = Description of Unknown: target sequence
gtttccaccatgattaagggtct

SEQ ID NO: 3991 - RNA, 23 nt, unidentified
  source 1..23: mol_type = unassigned RNA; note = Description of Unknown: target sequence
ctgaacatgcctagtccaacatt

SEQ ID NO: 3992 - RNA, 23 nt, unidentified
  source 1..23: mol_type = unassigned RNA; note = Description of Unknown: target sequence
atatcagtagtgtacattaccat

SEQ ID NO: 3993 - RNA, 23 nt, unidentified
  source 1..23: mol_type = unassigned RNA; note = Description of Unknown: target sequence
ctatccaagtgttataccaacta

SEQ ID NO: 3994 - RNA, 23 nt, unidentified
  source 1..23: mol_type = unassigned RNA; note = Description of Unknown: target sequence
ttccaagtccaatatggcaactc

SEQ ID NO: 3995 - RNA, 23 nt, unidentified
  source 1..23: mol_type = unassigned RNA; note = Description of Unknown: target sequence
gaatctcagaccttgtgaaggtg

SEQ ID NO: 3996 - RNA, 23 nt, unidentified
  source 1..23: mol_type = unassigned RNA; note = Description of Unknown: target sequence
atcatttcactgtctaggctaca

SEQ ID NO: 3997 - RNA, 23 nt, unidentified
  source 1..23: mol_type = unassigned RNA; note = Description of Unknown: target sequence
atccacagctatatcctgatgct

SEQ ID NO: 3998 - RNA, 23 nt, unidentified
  source 1..23: mol_type = unassigned RNA; note = Description of Unknown: target sequence
tccttcactgaacatgcctagtc

SEQ ID NO: 3999 - RNA, 23 nt, unidentified
  source 1..23: mol_type = unassigned RNA; note = Description of Unknown: target sequence
aggtggttgagagtgcttatgag

SEQ ID NO: 4000 - RNA, 23 nt, unidentified
  source 1..23: mol_type = unassigned RNA; note = Description of Unknown: target sequence
atcaaactcaaaggctacacatc

SEQ ID NO: 4001 - RNA, 23 nt, unidentified
  source 1..23: mol_type = unassigned RNA; note = Description of Unknown: target sequence
ctatatcagtagtgtacattacc

SEQ ID NO: 4002 - RNA, 23 nt, unidentified
  source 1..23: mol_type = unassigned RNA; note = Description of Unknown: target sequence
tgcaaccaactatccaagtgtta

SEQ ID NO: 4003 - RNA, 23 nt, unidentified
  source 1..23: mol_type = unassigned RNA; note = Description of Unknown: target sequence
tgtcatcgaagacaaattgaagg

SEQ ID NO: 4004 - RNA, 23 nt, unidentified
  source 1..23: mol_type = unassigned RNA; note = Description of Unknown: target sequence
tagcagatttggcagagagtata

SEQ ID NO: 4005 - RNA, 23 nt, unidentified
  source 1..23: mol_type = unassigned RNA; note = Description of Unknown: target sequence
ggctccttcactgaacatgccta

SEQ ID NO: 4006 - RNA, 23 nt, unidentified
  source 1..23: mol_type = unassigned RNA; note = Description of Unknown: target sequence
aacatgcctagtccaacattttt

SEQ ID NO: 4007 - RNA, 23 nt, unidentified
  source 1..23: mol_type = unassigned RNA; note = Description of Unknown: target sequence
tgtgccatcagtatcttaatgaa

SEQ ID NO: 4008 - RNA, 23 nt, unidentified
  source 1..23: mol_type = unassigned RNA; note = Description of Unknown: target sequence
gtgccatcagtatcttaatgaag

SEQ ID NO: 4009 - RNA, 23 nt, unidentified
  source 1..23: mol_type = unassigned RNA; note = Description of Unknown: target sequence
ccttagaacaccaaagattgtct

SEQ ID NO: 4010 - RNA, 23 nt, unidentified
  source 1..23: mol_type = unassigned RNA; note = Description of Unknown: target sequence
atatcatttcactgtctaggcta

SEQ ID NO: 4011 - RNA, 23 nt, unidentified
  source 1..23: mol_type = unassigned RNA; note = Description of Unknown: target sequence
tttcactgtctaggctacaacag

SEQ ID NO: 4012 - RNA, 23 nt, unidentified
  source 1..23: mol_type = unassigned RNA; note = Description of Unknown: target sequence
tgggatccagtgtataaatccaa

SEQ ID NO: 4013 - RNA, 23 nt, unidentified
  source 1..23: mol_type = unassigned RNA; note = Description of Unknown: target sequence
accaactatccaagtgttatacc

SEQ ID NO: 4014 - RNA, 23 nt, unidentified
  source 1..23: mol_type = unassigned RNA; note = Description of Unknown: target sequence
ttttggttccaagtccaatatgg

SEQ ID NO: 4015 - RNA, 23 nt, unidentified
  source 1..23: mol_type = unassigned RNA; note = Description of Unknown: target sequence
agtgcttatgaggtgatcaaact

SEQ ID NO: 4016 - RNA, 23 nt, unidentified
  source 1..23: mol_type = unassigned RNA; note = Description of Unknown: target sequence
tcaaactcaaaggctacacatcc

SEQ ID NO: 4017 - RNA, 23 nt, unidentified
  source 1..23: mol_type = unassigned RNA; note = Description of Unknown: target sequence
aatctcagaccttgtgaaggtga

SEQ ID NO: 4018 - RNA, 23 nt, unidentified
  source 1..23: mol_type = unassigned RNA; note = Description of Unknown: target sequence
tgtaaaatccacagctatatcct

SEQ ID NO: 4019 - RNA, 23 nt, unidentified
  source 1..23: mol_type = unassigned RNA; note = Description of Unknown: target sequence
ctccttcactgaacatgcctagt

SEQ ID NO: 4020 - RNA, 23 nt, unidentified
  source 1..23: mol_type = unassigned RNA; note = Description of Unknown: target sequence
ctgggatccagtgtataaatcca

SEQ ID NO: 4021 - RNA, 23 nt, unidentified
  source 1..23: mol_type = unassigned RNA; note = Description of Unknown: target sequence
cccaataaaccttgaacagtgac

SEQ ID NO: 4022 - RNA, 23 nt, unidentified
  source 1..23: mol_type = unassigned RNA; note = Description of Unknown: target sequence
atggcctgtgccatcagtatctt

SEQ ID NO: 4023 - RNA, 23 nt, unidentified
  source 1..23: mol_type = unassigned RNA; note = Description of Unknown: target sequence
tcttgttgatgtcatcgaagaca

SEQ ID NO: 4024 - RNA, 23 nt, unidentified
  source 1..23: mol_type = unassigned RNA; note = Description of Unknown: target sequence
aaggatcttattttgtgaactat

SEQ ID NO: 4025 - RNA, 23 nt, unidentified
  source 1..23: mol_type = unassigned RNA; note = Description of Unknown: target sequence
caaaggatcttattttgtgaact

SEQ ID NO: 4026 - RNA, 23 nt, unidentified
  source 1..23: mol_type = unassigned RNA; note = Description of Unknown: target sequence
atatcatgtcttgtgcataattc

SEQ ID NO: 4027 - RNA, 23 nt, unidentified
  source 1..23: mol_type = unassigned RNA; note = Description of Unknown: target sequence
gatgtcatatcatttcactgtct

SEQ ID NO: 4028 - RNA, 23 nt, unidentified
  source 1..23: mol_type = unassigned RNA; note = Description of Unknown: target sequence
tgtcatatcatttcactgtctag

SEQ ID NO: 4029 - RNA, 23 nt, unidentified
  source 1..23: mol_type = unassigned RNA; note = Description of Unknown: target sequence
tgatttataatcttctaaaggaa

SEQ ID NO: 4030 - RNA, 23 nt, unidentified
  source 1..23: mol_type = unassigned RNA; note = Description of Unknown: target sequence
aatggtttgtaaaatccacagct

SEQ ID NO: 4031 - RNA, 23 nt, unidentified
  source 1..23: mol_type = unassigned RNA; note = Description of Unknown: target sequence
tgatgctggatggtattaatctt

SEQ ID NO: 4032 - RNA, 23 nt, unidentified
  source 1..23: mol_type = unassigned RNA; note = Description of Unknown: target sequence
tgaactatatcagtagtgtacat

SEQ ID NO: 4033 - RNA, 23 nt, unidentified
  source 1..23: mol_type = unassigned RNA; note = Description of Unknown: target sequence
acatcaactcctgaagttagaaa

SEQ ID NO: 4034 - RNA, 23 nt, unidentified
  source 1..23: mol_type = unassigned RNA; note = Description of Unknown: target sequence
tgctggatggtattaatcttgtg

SEQ ID NO: 4035 - RNA, 23 nt, unidentified
  source 1..23: mol_type = unassigned RNA; note = Description of Unknown: target sequence
catatcatttcactgtctaggct

SEQ ID NO: 4036 - RNA, 23 nt, unidentified
  source 1..23: mol_type = unassigned RNA; note = Description of Unknown: target sequence
ttgtaaaatccacagctatatcc

SEQ ID NO: 4037 - RNA, 23 nt, unidentified
  source 1..23: mol_type = unassigned RNA; note = Description of Unknown: target sequence
cttccttagtgttccttgcattt

SEQ ID NO: 4038 - RNA, 23 nt, unidentified
  source 1..23: mol_type = unassigned RNA; note = Description of Unknown: target sequence
gtcatatcatttcactgtctagg

SEQ ID NO: 4039 - RNA, 23 nt, unidentified
  source 1..23: mol_type = unassigned RNA; note = Description of Unknown: target sequence
aaaacatcaactcctgaagttag

SEQ ID NO: 4040 - RNA, 23 nt, unidentified
  source 1..23: mol_type = unassigned RNA; note = Description of Unknown: target sequence
atcctgatgctggatggtattaa

SEQ ID NO: 4041 - RNA, 23 nt, unidentified
  source 1..23: mol_type = unassigned RNA; note = Description of Unknown: target sequence
acaatgcaaccaactatccaagt

SEQ ID NO: 4042 - RNA, 23 nt, unidentified
  source 1..23: mol_type = unassigned RNA; note = Description of Unknown: target sequence
tctttacggaataaaggatgatg

SEQ ID NO: 4043 - RNA, 23 nt, unidentified
  source 1..23: mol_type = unassigned RNA; note = Description of Unknown: target sequence
tcttccttagtgttccttgcatt

SEQ ID NO: 4044 - RNA, 23 nt, unidentified
  source 1..23: mol_type = unassigned RNA; note = Description of Unknown: target sequence
aacaatgcaaccaactatccaag

SEQ ID NO: 4045 - RNA, 23 nt, unidentified
  source 1..23: mol_type = unassigned RNA; note = Description of Unknown: target sequence
gcagatttggcagagagtataat

SEQ ID NO: 4046 - RNA, 23 nt, unidentified
  source 1..23: mol_type = unassigned RNA; note = Description of Unknown: target sequence
agtttccaccatgattaagggtc

SEQ ID NO: 4047 - RNA, 23 nt, unidentified
  source 1..23: mol_type = unassigned RNA; note = Description of Unknown: target sequence
caactggttagtgtgaaatagtt

SEQ ID NO: 4048 - RNA, 23 nt, unidentified
  source 1..23: mol_type = unassigned RNA; note = Description of Unknown: target sequence
tccaagtccaatatggcaactct

SEQ ID NO: 4049 - RNA, 23 nt, unidentified
  source 1..23: mol_type = unassigned RNA; note = Description of Unknown: target sequence
tttccaccatgattaagggtctt

SEQ ID NO: 4050 - RNA, 23 nt, unidentified
  source 1..23: mol_type = unassigned RNA; note = Description of Unknown: target sequence
tatcatttcactgtctaggctac

SEQ ID NO: 4051 - RNA, 23 nt, unidentified
  source 1..23: mol_type = unassigned RNA; note = Description of Unknown: target sequence
gttgtcctttttatctgatctgt

SEQ ID NO: 4052 - RNA, 23 nt, unidentified
  source 1..23: mol_type = unassigned RNA; note = Description of Unknown: target sequence
atccagtgtataaatccaatatc

SEQ ID NO: 4053 - RNA, 23 nt, unidentified
  source 1..23: mol_type = unassigned RNA; note = Description of Unknown: target sequence
tatccaagtgttataccaactaa

SEQ ID NO: 4054 - RNA, 23 nt, unidentified
  source 1..23: mol_type = unassigned RNA; note = Description of Unknown: target sequence
tagaacaccaaagattgtctctg

SEQ ID NO: 4055 - RNA, 23 nt, unidentified
  source 1..23: mol_type = unassigned RNA; note = Description of Unknown: target sequence
agaacaccaaagattgtctctgg

SEQ ID NO: 4056 - RNA, 23 nt, unidentified
  source 1..23: mol_type = unassigned RNA; note = Description of Unknown: target sequence
gcatgttgtcctttttatctgat

SEQ ID NO: 4057 - RNA, 23 nt, unidentified
  source 1..23: mol_type = unassigned RNA; note = Description of Unknown: target sequence
catcaactcctgaagttagaaat

SEQ ID NO: 4058 - RNA, 23 nt, unidentified
  source 1..23: mol_type = unassigned RNA; note = Description of Unknown: target sequence
ccaactatccaagtgttatacca

SEQ ID NO: 4059 - RNA, 23 nt, unidentified
  source 1..23: mol_type = unassigned RNA; note = Description of Unknown: target sequence
atggtattaatcttgtgtagtct

SEQ ID NO: 4060 - RNA, 23 nt, unidentified
  source 1..23: mol_type = unassigned RNA; note = Description of Unknown: target sequence
ctggctccttcactgaacatgcc

SEQ ID NO: 4061 - RNA, 23 nt, unidentified
  source 1..23: mol_type = unassigned RNA; note = Description of Unknown: target sequence
tatatcagtagtgtacattacca

SEQ ID NO: 4062 - RNA, 23 nt, unidentified
  source 1..23: mol_type = unassigned RNA; note = Description of Unknown: target sequence
ggcagccttttccttagaacacc

SEQ ID NO: 4063 - RNA, 23 nt, unidentified
  source 1..23: mol_type = unassigned RNA; note = Description of Unknown: target sequence
aactggttagtgtgaaatagttc

SEQ ID NO: 4064 - RNA, 23 nt, unidentified
  source 1..23: mol_type = unassigned RNA; note = Description of Unknown: target sequence
gaactatatcagtagtgtacatt

SEQ ID NO: 4065 - RNA, 23 nt, unidentified
  source 1..23: mol_type = unassigned RNA; note = Description of Unknown: target sequence
actatatcagtagtgtacattac

SEQ ID NO: 4066 - RNA, 23 nt, unidentified
  source 1..23: mol_type = unassigned RNA; note = Description of Unknown: target sequence
cagtaatattttaagatggactg

SEQ ID NO: 4067 - RNA, 23 nt, unidentified
  source 1..23: mol_type = unassigned RNA; note = Description of Unknown: target sequence
tattttaagatggactgggaaaa

SEQ ID NO: 4068 - RNA, 23 nt, unidentified
  source 1..23: mol_type = unassigned RNA; note = Description of Unknown: target sequence
ccttcactgaacatgcctagtcc

SEQ ID NO: 4069 - RNA, 23 nt, unidentified
  source 1..23: mol_type = unassigned RNA; note = Description of Unknown: target sequence
caaccaactatccaagtgttata

SEQ ID NO: 4070 - RNA, 23 nt, unidentified
  source 1..23: mol_type = unassigned RNA; note = Description of Unknown: target sequence
atccaagtgttataccaactaaa

SEQ ID NO: 4071 - RNA, 23 nt, unidentified
  source 1..23: mol_type = unassigned RNA; note = Description of Unknown: target sequence
gcagtaatattttaagatggact

SEQ ID NO: 4072 - RNA, 23 nt, unidentified
  source 1..23: mol_type = unassigned RNA; note = Description of Unknown: target sequence
gtaaaatccacagctatatcctg

SEQ ID NO: 4073 - RNA, 23 nt, unidentified
  source 1..23: mol_type = unassigned RNA; note = Description of Unknown: target sequence
gctccttcactgaacatgcctag

SEQ ID NO: 4074 - RNA, 23 nt, unidentified
  source 1..23: mol_type = unassigned RNA; note = Description of Unknown: target sequence
ttcactgaacatgcctagtccaa

SEQ ID NO: 4075 - RNA, 23 nt, unidentified
  source 1..23: mol_type = unassigned RNA; note = Description of Unknown: target sequence
ccaagtgttataccaactaaaac

SEQ ID NO: 4076 - RNA, 23 nt, unidentified
  source 1..23: mol_type = unassigned RNA; note = Description of Unknown: target sequence
gtttccaccatgattaagggtct

SEQ ID NO: 4077 - RNA, 23 nt, unidentified
  source 1..23: mol_type = unassigned RNA; note = Description of Unknown: target sequence
ctgaacatgcctagtccaacatt

SEQ ID NO: 4078 - RNA, 23 nt, unidentified
  source 1..23: mol_type = unassigned RNA; note = Description of Unknown: target sequence
atatcagtagtgtacattaccat

SEQ ID NO: 4079 - RNA, 23 nt, unidentified
  source 1..23: mol_type = unassigned RNA; note = Description of Unknown: target sequence
ctatccaagtgttataccaacta

SEQ ID NO: 4080 - RNA, 23 nt, unidentified
  source 1..23: mol_type = unassigned RNA; note = Description of Unknown: target sequence
ttccaagtccaatatggcaactc

SEQ ID NO: 4081 - RNA, 23 nt, unidentified
  source 1..23: mol_type = unassigned RNA; note = Description of Unknown: target sequence
atcatttcactgtctaggctaca

SEQ ID NO: 4082 - RNA, 23 nt, unidentified
  source 1..23: mol_type = unassigned RNA; note = Description of Unknown: target sequence
atccacagctatatcctgatgct

SEQ ID NO: 4083 - RNA, 23 nt, unidentified
  source 1..23: mol_type = unassigned RNA; note = Description of Unknown: target sequence
tccttcactgaacatgcctagtc

SEQ ID NO: 4084 - RNA, 23 nt, unidentified
  source 1..23: mol_type = unassigned RNA; note = Description of Unknown: target sequence
aggtggttgagagtgcttatgag

SEQ ID NO: 4085 - RNA, 23 nt, unidentified
  source 1..23: mol_type = unassigned RNA; note = Description of Unknown: target sequence
ctatatcagtagtgtacattacc

SEQ ID NO: 4086 - RNA, 23 nt, unidentified
  source 1..23: mol_type = unassigned RNA; note = Description of Unknown: target sequence
tgcaaccaactatccaagtgtta

SEQ ID NO: 4087 - RNA, 23 nt, unidentified
  source 1..23: mol_type = unassigned RNA; note = Description of Unknown: target sequence
tagcagatttggcagagagtata

SEQ ID NO: 4088 - RNA, 23 nt, unidentified
  source 1..23: mol_type = unassigned RNA; note = Description of Unknown: target sequence
ggctccttcactgaacatgccta

SEQ ID NO: 4089 - RNA, 23 nt, unidentified
  source 1..23: mol_type = unassigned RNA; note = Description of Unknown: target sequence
aacatgcctagtccaacattttt

SEQ ID NO: 4090 - RNA, 23 nt, unidentified
  source 1..23: mol_type = unassigned RNA; note = Description of Unknown: target sequence
tgtgccatcagtatcttaatgaa

SEQ ID NO: 4091 - RNA, 23 nt, unidentified
  source 1..23: mol_type = unassigned RNA; note = Description of Unknown: target sequence
gtgccatcagtatcttaatgaag

SEQ ID NO: 4092 - RNA, 23 nt, unidentified
  source 1..23: mol_type = unassigned RNA; note = Description of Unknown: target sequence
ccttagaacaccaaagattgtct

SEQ ID NO: 4093 - RNA, 23 nt, unidentified
  source 1..23: mol_type = unassigned RNA; note = Description of Unknown: target sequence
atatcatttcactgtctaggcta

SEQ ID NO: 4094 - RNA, 23 nt, unidentified
  source 1..23: mol_type = unassigned RNA; note = Description of Unknown: target sequence
tttcactgtctaggctacaacag

SEQ ID NO: 4095 - RNA, 23 nt, unidentified
  source 1..23: mol_type = unassigned RNA; note = Description of Unknown: target sequence
accaactatccaagtgttatacc

SEQ ID NO: 4096 - RNA, 23 nt, unidentified
  source 1..23: mol_type = unassigned RNA; note = Description of Unknown: target sequence
ttttggttccaagtccaatatgg

SEQ ID NO: 4097 - RNA, 23 nt, unidentified
  source 1..23: mol_type = unassigned RNA; note = Description of Unknown: target sequence
agtgcttatgaggtgatcaaact

SEQ ID NO: 4098 - RNA, 23 nt, unidentified
  source 1..23: mol_type = unassigned RNA; note = Description of Unknown: target sequence
aatctcagaccttgtgaaggtga

SEQ ID NO: 4099 - RNA, 23 nt, unidentified
  source 1..23: mol_type = unassigned RNA; note = Description of Unknown: target sequence
tgtaaaatccacagctatatcct

SEQ ID NO: 4100 - RNA, 23 nt, unidentified
  source 1..23: mol_type = unassigned RNA; note = Description of Unknown: target sequence
ctccttcactgaacatgcctagt

SEQ ID NO: 4101 - RNA, 23 nt, unidentified
  source 1..23: mol_type = unassigned RNA; note = Description of Unknown: target sequence
ctgggatccagtgtataaatcca

SEQ ID NO: 4102 - RNA, 23 nt, unidentified
  source 1..23: mol_type = unassigned RNA; note = Description of Unknown: target sequence
cccaataaaccttgaacagtgac

SEQ ID NO: 4103 - RNA, 23 nt, unidentified
  source 1..23: mol_type = unassigned RNA; note = Description of Unknown: target sequence
atggcctgtgccatcagtatctt

SEQ ID NO: 4104 - RNA, 23 nt, unidentified
  source 1..23: mol_type = unassigned RNA; note = Description of Unknown: target sequence
tcttgttgatgtcatcgaagaca

SEQ ID NO: 4105 - RNA, 23 nt, unidentified
  source 1..23: mol_type = unassigned RNA; note = Description of Unknown: target sequence
gcagatttggcagagagtataat

SEQ ID NO: 4106 - RNA, 23 nt, unidentified
  source 1..23: mol_type = unassigned RNA; note = Description of Unknown: target sequence
agtttccaccatgattaagggtc

SEQ ID NO: 4107 - RNA, 23 nt, unidentified
  source 1..23: mol_type = unassigned RNA; note = Description of Unknown: target sequence
gtctaggctacaacaggattcta

SEQ ID NO: 4108 - RNA, 23 nt, unidentified
  source 1..23: mol_type = unassigned RNA; note = Description of Unknown: target sequence
ggtggaggttgtgcatgttgtcc

SEQ ID NO: 4109 - RNA, 23 nt, unidentified
  source 1..23: mol_type = unassigned RNA; note = Description of Unknown: target sequence
tggctccttcactgaacatgcct

SEQ ID NO: 4110 - RNA, 23 nt, unidentified
  source 1..23: mol_type = unassigned RNA; note = Description of Unknown: target sequence
tccttttggttccaagtccaata

SEQ ID NO: 4111 - RNA, 23 nt, unidentified
  source 1..23: mol_type = unassigned RNA; note = Description of Unknown: target sequence
tggcctgtgccatcagtatctta

SEQ ID NO: 4112 - RNA, 23 nt, unidentified
  source 1..23: mol_type = unassigned RNA; note = Description of Unknown: target sequence
gtgcttatgaggtgatcaaactc

SEQ ID NO: 4113 - RNA, 23 nt, unidentified
  source 1..23: mol_type = unassigned RNA; note = Description of Unknown: target sequence
tgcttatgaggtgatcaaactca

SEQ ID NO: 4114 - RNA, 23 nt, unidentified
  source 1..23: mol_type = unassigned RNA; note = Description of Unknown: target sequence
ttccttgcattttgggacagaat

SEQ ID NO: 4115 - RNA, 23 nt, unidentified
  source 1..23: mol_type = unassigned RNA; note = Description of Unknown: target sequence
ttggttccaagtccaatatggca

SEQ ID NO: 4116 - RNA, 23 nt, unidentified
  source 1..23: mol_type = unassigned RNA; note = Description of Unknown: target sequence
ttcactgtctaggctacaacagg

SEQ ID NO: 4117 - RNA, 23 nt, unidentified
  source 1..23: mol_type = unassigned RNA; note = Description of Unknown: target sequence
tcactgtctaggctacaacagga

SEQ ID NO: 4118 - RNA, 23 nt, unidentified
  source 1..23: mol_type = unassigned RNA; note = Description of Unknown: target sequence
agaataagattacagttgttggg

SEQ ID NO: 4119 - RNA, 23 nt, unidentified
  source 1..23: mol_type = unassigned RNA; note = Description of Unknown: target sequence
tggttgagagtgcttatgaggtg

SEQ ID NO: 4120 - RNA, 23 nt, unidentified
  source 1..23: mol_type = unassigned RNA; note = Description of Unknown: target sequence
ctgtctaggctacaacaggattc

SEQ ID NO: 4121 - RNA, 23 nt, unidentified
  source 1..23: mol_type = unassigned RNA; note = Description of Unknown: target sequence
tgtctaggctacaacaggattct

SEQ ID NO: 4122 - RNA, 23 nt, unidentified
  source 1..23: mol_type = unassigned RNA; note = Description of Unknown: target sequence
aggtggaggttgtgcatgttgtc

SEQ ID NO: 4123 - RNA, 23 nt, unidentified
  source 1..23: mol_type = unassigned RNA; note = Description of Unknown: target sequence
tatgaggtgatcaaactcaaagg

SEQ ID NO: 4124 - RNA, 23 nt, unidentified
  source 1..23: mol_type = unassigned RNA; note = Description of Unknown: target sequence
aggtgatcaaactcaaaggctac

SEQ ID NO: 4125 - RNA, 23 nt, unidentified
  source 1..23: mol_type = unassigned RNA; note = Description of Unknown: target sequence
tctgaggaagaggcccgtttgaa

SEQ ID NO: 4126 - RNA, 23 nt, unidentified
  source 1..23: mol_type = unassigned RNA; note = Description of Unknown: target sequence
tcacaagcaggtggttgagagtg

SEQ ID NO: 4127 - RNA, 23 nt, unidentified
  source 1..23: mol_type = unassigned RNA; note = Description of Unknown: target sequence
agcagatttggcagagagtataa

SEQ ID NO: 4128 - RNA, 23 nt, unidentified
  source 1..23: mol_type = unassigned RNA; note = Description of Unknown: target sequence
gagtgcttatgaggtgatcaaac

SEQ ID NO: 4129 - RNA, 23 nt, unidentified
  source 1..23: mol_type = unassigned RNA; note = Description of Unknown: target sequence
gtagcagatttggcagagagtat

SEQ ID NO: 4130 - RNA, 23 nt, unidentified
  source 1..23: mol_type = unassigned RNA; note = Description of Unknown: target sequence
agatttggcagagagtataatga

SEQ ID NO: 4131 - RNA, 23 nt, unidentified
  source 1..23: mol_type = unassigned RNA; note = Description of Unknown: target sequence
gatttggcagagagtataatgaa

SEQ ID NO: 4132 - RNA, 23 nt, unidentified
  source 1..23: mol_type = unassigned RNA; note = Description of Unknown: target sequence
tccttgcattttgggacagaatg

SEQ ID NO: 4133 - RNA, 23 nt, unidentified
  source 1..23: mol_type = unassigned RNA; note = Description of Unknown: target sequence
gaatggaatctcagaccttgtga

SEQ ID NO: 4134 - RNA, 23 nt, unidentified
  source 1..23: mol_type = unassigned RNA; note = Description of Unknown: target sequence
tccacagctatatcctgatgctg

SEQ ID NO: 4135 - RNA, 23 nt, unidentified
  source 1..23: mol_type = unassigned RNA; note = Description of Unknown: target sequence
ctgaggaagaggcccgtttgaag

SEQ ID NO: 4136 - RNA, 23 nt, unidentified
  source 1..23: mol_type = unassigned RNA; note = Description of Unknown: target sequence
cttctgaggaagaggcccgtttg

SEQ ID NO: 4137 - RNA, 23 nt, unidentified
  source 1..23: mol_type = unassigned RNA; note = Description of Unknown: target sequence
gtcacatcctgggatccagtgta

SEQ ID NO: 4138 - RNA, 23 nt, unidentified
  source 1..23: mol_type = unassigned RNA; note = Description of Unknown: target sequence
gcagccttttccttagaacacca

SEQ ID NO: 4139 - RNA, 23 nt, unidentified
  source 1..23: mol_type = unassigned RNA; note = Description of Unknown: target sequence
cttcaactggttagtgtgaaata

SEQ ID NO: 4140 - RNA, 21 nt, synthetic construct
  source 1..21: mol_type = other RNA; note = Description of Artificial Sequence: Synthetic oligonucleotide
  modified_base 1: mod_base = OTHER; note = 2'-fluoroguanosine-3'-phosphorothioate
  modified_base 2: mod_base = OTHER; note = 2'-O-methyladenosine-3'-phosphorothioate
  modified_base 3: mod_base = OTHER; note = 2'-fluoroadenosine-3'-phosphate
  modified_base 4: mod_base = OTHER; note = 2'-O-methyluridine-3'-phosphate
  modified_base 5: mod_base = OTHER; note = 2'-fluoroguanosine-3'-phosphate
  modified_base 6: mod_base = OTHER; note = 2'-O-methyluridine-3'-phosphate
  modified_base 7: mod_base = OTHER; note = 2'-fluoroguanosine-3'-phosphate
  modified_base 8: mod_base = OTHER; note = 2'-O-methyladenosine-3'-phosphate
  modified_base 9: mod_base = OTHER; note = 2'-fluoroadenosine-3'-phosphate
  modified_base 10: mod_base = OTHER; note = 2'-fluoroadenosine-3'-phosphate
  modified_base 11: mod_base = OTHER; note = 2'-fluoroguanosine-3'-phosphate
  modified_base 12: mod_base = OTHER; note = 2'-O-methyluridine-3'-phosphate
  modified_base 13: mod_base = OTHER; note = 2'-fluorocytidine-3'-phosphate
  modified_base 14: mod_base = OTHER; note = 2'-O-methyladenosine-3'-phosphate
  modified_base 15: mod_base = OTHER; note = 2'-fluorouridine-3'-phosphate
  modified_base 16: mod_base = OTHER; note = 2'-O-methylcytidine-3'-phosphate
  modified_base 17: mod_base = OTHER; note = 2'-fluoroguanosine-3'-phosphate
  modified_base 18: mod_base = OTHER; note = 2'-O-methyladenosine-3'-phosphate
  modified_base 19: mod_base = OTHER; note = 2'-fluorocytidine-3'-phosphate
  modified_base 20: mod_base = OTHER; note = 2'-O-methyladenosine-3'-phosphate
  modified_base 21: mod_base = OTHER; note = 2'-fluoroadenosine-3'-phosphate N-[tris(GalNAc-alkyl)-amidodecanoyl)]-4-hydroxyprolinol Hyp-(GalNAc-alkyl)3
gaatgtgaaagtcatcgacaa

SEQ ID NO: 4141 - RNA, 21 nt, synthetic construct
  source 1..21: mol_type = other RNA; note = Description of Artificial Sequence: Synthetic oligonucleotide
  modified_base 1: mod_base = OTHER; note = 2'-fluorouridine -3'-phosphorothioate
  modified_base 2: mod_base = OTHER; note = 2'-O-methyluridine-3'-phosphorothioate
  modified_base 3: mod_base = OTHER; note = 2'-fluorouridine-3'-phosphate
  modified_base 4: mod_base = OTHER; note = 2'-O-methyluridine-3'-phosphate
  modified_base 5: mod_base = OTHER; note = 2'-fluorocytidine-3'-phosphate
  modified_base 6: mod_base = OTHER; note = 2'-O-methyladenosine-3'-phosphate
  modified_base 7: mod_base = OTHER; note = 2'-fluoroadenosine-3'-phosphate
  modified_base 8: mod_base = OTHER; note = 2'-O-methyluridine-3'-phosphate
  modified_base 9: mod_base = OTHER; note = 2'-fluoroguanosine-3'-phosphate
  modified_base 10: mod_base = OTHER; note = 2'-fluoroguanosine-3'-phosphate
  modified_base 11: mod_base = OTHER; note = 2'-fluoroguanosine-3'-phosphate
  modified_base 12: mod_base = OTHER; note = 2'-O-methyluridine-3'-phosphate
  modified_base 13: mod_base = OTHER; note = 2'-fluoroguanosine-3'-phosphate
  modified_base 14: mod_base = OTHER; note = 2'-O-methyluridine-3'-phosphate
  modified_base 15: mod_base = OTHER; note = 2'-fluorocytidine-3'-phosphate
  modified_base 16: mod_base = OTHER; note = 2'-O-methylcytidine-3'-phosphate
  modified_base 17: mod_base = OTHER; note = 2'-fluorouridine-3'-phosphate
  modified_base 18: mod_base = OTHER; note = 2'-O-methyladenosine-3'-phosphate
  modified_base 19: mod_base = OTHER; note = 2'-fluoroguanosine-3'-phosphate
  modified_base 20: mod_base = OTHER; note = 2'-O-methylguanosine-3'-phosphate
  modified_base 21: mod_base = OTHER; note = 2'-fluoroadenosine-3'-phosphate N-[tris(GalNAc-alkyl)-amidodecanoyl)]-4-hydroxyprolinol Hyp-(GalNAc-alkyl)3
ttttcaatgggtgtcctagga

SEQ ID NO: 4142 - RNA, 21 nt, synthetic construct
  source 1..21: mol_type = other RNA; note = Description of Artificial Sequence: Synthetic oligonucleotide
  modified_base 1: mod_base = OTHER; note = 2'-fluoroguanosine-3'-phosphorothioate
  modified_base 2: mod_base = OTHER; note = 2'-O-methyladenosine-3'-phosphorothioate
  modified_base 3: mod_base = OTHER; note = 2'-fluoroadenosine-3'-phosphate
  modified_base 4: mod_base = OTHER; note = 2'-O-methyladenosine-3'-phosphate
  modified_base 5: mod_base = OTHER; note = 2'-fluoroguanosine-3'-phosphate
  modified_base 6: mod_base = OTHER; note = 2'-O-methyluridine-3'-phosphate
  modified_base 7: mod_base = OTHER; note = 2'-fluorocytidine-3'-phosphate
  modified_base 8: mod_base = OTHER; note = 2'-O-methyladenosine-3'-phosphate
  modified_base 9: mod_base = OTHER; note = 2'-fluorouridine-3'-phosphate
  modified_base 10: mod_base = OTHER; note = 2'-fluorocytidine-3'-phosphate
  modified_base 11: mod_base = OTHER; note = 2'-fluoroguanosine-3'-phosphate
  modified_base 12: mod_base = OTHER; note = 2'-O-methyladenosine-3'-phosphate
  modified_base 13: mod_base = OTHER; note = 2'-fluorocytidine-3'-phosphate
  modified_base 14: mod_base = OTHER; note = 2'-O-methyladenosine-3'-phosphate
  modified_base 15: mod_base = OTHER; note = 2'-fluoroadenosine-3'-phosphate
  modified_base 16: mod_base = OTHER; note = 2'-O-methylguanosine-3'-phosphate
  modified_base 17: mod_base = OTHER; note = 2'-fluoroadenosine-3'-phosphate
  modified_base 18: mod_base = OTHER; note = 2'-O-methylcytidine-3'-phosphate
  modified_base 19: mod_base = OTHER; note = 2'-fluoroadenosine-3'-phosphate
  modified_base 20: mod_base = OTHER; note = 2'-O-methyluridine-3'-phosphate
  modified_base 21: mod_base = OTHER; note = 2'-fluorouridine-3'-phosphate N-[tris(GalNAc-alkyl)-amidodecanoyl)]-4-hydroxyprolinol Hyp-(GalNAc-alkyl)3
gaaagtcatcgacaagacatt

SEQ ID NO: 4143 - RNA, 21 nt, synthetic construct
  source 1..21: mol_type = other RNA; note = Description of Artificial Sequence: Synthetic oligonucleotide
  modified_base 1: mod_base = OTHER; note = 2'-fluorouridine -3'-phosphorothioate
  modified_base 2: mod_base = OTHER; note = 2'-O-methylcytidine-3'-phosphorothioate
  modified_base 3: mod_base = OTHER; note = 2'-fluoroadenosine-3'-phosphate
  modified_base 4: mod_base = OTHER; note = 2'-O-methyluridine-3'-phosphate
  modified_base 5: mod_base = OTHER; note = 2'-fluorocytidine-3'-phosphate
  modified_base 6: mod_base = OTHER; note = 2'-O-methylguanosine-3'-phosphate
  modified_base 7: mod_base = OTHER; note = 2'-fluoroadenosine-3'-phosphate
  modified_base 8: mod_base = OTHER; note = 2'-O-methylcytidine-3'-phosphate
  modified_base 9: mod_base = OTHER; note = 2'-fluoroadenosine-3'-phosphate
  modified_base 10: mod_base = OTHER; note = 2'-fluoroadenosine-3'-phosphate
  modified_base 11: mod_base = OTHER; note = 2'-fluoroguanosine-3'-phosphate
  modified_base 12: mod_base = OTHER; note = 2'-O-methyladenosine-3'-phosphate
  modified_base 13: mod_base = OTHER; note = 2'-fluorocytidine-3'-phosphate
  modified_base 14: mod_base = OTHER; note = 2'-O-methyladenosine-3'-phosphate
  modified_base 15: mod_base = OTHER; note = 2'-fluorouridine-3'-phosphate
  modified_base 16: mod_base = OTHER; note = 2'-O-methyluridine-3'-phosphate
  modified_base 17: mod_base = OTHER; note = 2'-fluoroguanosine-3'-phosphate
  modified_base 18: mod_base = OTHER; note = 2'-O-methylguanosine-3'-phosphate
  modified_base 19: mod_base = OTHER; note = 2'-fluorouridine-3'-phosphate
  modified_base 20: mod_base = OTHER; note = 2'-O-methylguanosine-3'-phosphate
  modified_base 21: mod_base = OTHER; note = 2'-fluoroadenosine-3'-phosphate N-[tris(GalNAc-alkyl)-amidodecanoyl)]-4-hydroxyprolinol Hyp-(GalNAc-alkyl)3
tcatcgacaagacattggtga

SEQ ID NO: 4144 - RNA, 21 nt, synthetic construct
  source 1..21: mol_type = other RNA; note = Description of Artificial Sequence: Synthetic oligonucleotide
  modified_base 1: mod_base = OTHER; note = 2'-fluorouridine -3'-phosphorothioate
  modified_base 2: mod_base = OTHER; note = 2'-O-methyluridine-3'-phosphorothioate
  modified_base 3: mod_base = OTHER; note = 2'-fluorouridine-3'-phosphate
  modified_base 4: mod_base = OTHER; note = 2'-O-methylcytidine-3'-phosphate
  modified_base 5: mod_base = OTHER; note = 2'-fluoroadenosine-3'-phosphate
  modified_base 6: mod_base = OTHER; note = 2'-O-methyladenosine-3'-phosphate
  modified_base 7: mod_base = OTHER; note = 2'-fluorouridine-3'-phosphate
  modified_base 8: mod_base = OTHER; note = 2'-O-methylguanosine-3'-phosphate
  modified_base 9: mod_base = OTHER; note = 2'-fluoroguanosine-3'-phosphate
  modified_base 10: mod_base = OTHER; note = 2'-fluoroguanosine-3'-phosphate
  modified_base 11: mod_base = OTHER; note = 2'-fluorouridine-3'-phosphate
  modified_base 12: mod_base = OTHER; note = 2'-O-methylguanosine-3'-phosphate
  modified_base 13: mod_base = OTHER; note = 2'-fluorouridine-3'-phosphate
  modified_base 14: mod_base = OTHER; note = 2'-O-methylcytidine-3'-phosphate
  modified_base 15: mod_base = OTHER; note = 2'-fluorocytidine-3'-phosphate
  modified_base 16: mod_base = OTHER; note = 2'-O-methyluridine-3'-phosphate
  modified_base 17: mod_base = OTHER; note = 2'-fluoroadenosine-3'-phosphate
  modified_base 18: mod_base = OTHER; note = 2'-O-methylguanosine-3'-phosphate
  modified_base 19: mod_base = OTHER; note = 2'-fluoroguanosine-3'-phosphate
  modified_base 20: mod_base = OTHER; note = 2'-O-methyladenosine-3'-phosphate
  modified_base 21: mod_base = OTHER; note = 2'-fluoroadenosine-3'-phosphate N-[tris(GalNAc-alkyl)-amidodecanoyl)]-4-hydroxyprolinol Hyp-(GalNAc-alkyl)3
tttcaatgggtgtcctaggaa

SEQ ID NO: 4145 - RNA, 21 nt, synthetic construct
  source 1..21: mol_type = other RNA; note = Description of Artificial Sequence: Synthetic oligonucleotide
  modified_base 1: mod_base = OTHER; note = 2'-fluoroadenosine-3'-phosphorothioate
  modified_base 2: mod_base = OTHER; note = 2'-O-methyladenosine-3'-phosphorothioate
  modified_base 3: mod_base = OTHER; note = 2'-fluorouridine-3'-phosphate
  modified_base 4: mod_base = OTHER; note = 2'-O-methylguanosine-3'-phosphate
  modified_base 5: mod_base = OTHER; note = 2'-fluoroguanosine-3'-phosphate
  modified_base 6: mod_base = OTHER; note = 2'-O-methylguanosine-3'-phosphate
  modified_base 7: mod_base = OTHER; note = 2'-fluorouridine-3'-phosphate
  modified_base 8: mod_base = OTHER; note = 2'-O-methylguanosine-3'-phosphate
  modified_base 9: mod_base = OTHER; note = 2'-fluorouridine-3'-phosphate
  modified_base 10: mod_base = OTHER; note = 2'-fluorocytidine-3'-phosphate
  modified_base 11: mod_base = OTHER; note = 2'-fluorocytidine-3'-phosphate
  modified_base 12: mod_base = OTHER; note = 2'-O-methyluridine-3'-phosphate
  modified_base 13: mod_base = OTHER; note = 2'-fluoroadenosine-3'-phosphate
  modified_base 14: mod_base = OTHER; note = 2'-O-methylguanosine-3'-phosphate
  modified_base 15: mod_base = OTHER; note = 2'-fluoroguanosine-3'-phosphate
  modified_base 16: mod_base = OTHER; note = 2'-O-methyladenosine-3'-phosphate
  modified_base 17: mod_base = OTHER; note = 2'-fluoroadenosine-3'-phosphate
  modified_base 18: mod_base = OTHER; note = 2'-O-methylcytidine-3'-phosphate
  modified_base 19: mod_base = OTHER; note = 2'-fluorocytidine-3'-phosphate
  modified_base 20: mod_base = OTHER; note = 2'-O-methyluridine-3'-phosphate
  modified_base 21: mod_base = OTHER; note = 2'-fluorouridine-3'-phosphate N-[tris(GalNAc-alkyl)-amidodecanoyl)]-4-hydroxyprolinol Hyp-(GalNAc-alkyl)3
aatgggtgtcctaggaacctt

SEQ ID NO: 4146 - RNA, 21 nt, synthetic construct
  source 1..21: mol_type = other RNA; note = Description of Artificial Sequence: Synthetic oligonucleotide
  modified_base 1: mod_base = OTHER; note = 2'-fluoroguanosine-3'-phosphorothioate
  modified_base 2: mod_base = OTHER; note = 2'-O-methyladenosine-3'-phosphorothioate
  modified_base 3: mod_base = OTHER; note = 2'-fluorocytidine-3'-phosphate
  modified_base 4: mod_base = OTHER; note = 2'-O-methyladenosine-3'-phosphate
  modified_base 5: mod_base = OTHER; note = 2'-fluoroguanosine-3'-phosphate
  modified_base 6: mod_base = OTHER; note = 2'-O-methyluridine-3'-phosphate
  modified_base 7: mod_base = OTHER; note = 2'-fluoroguanosine-3'-phosphate
  modified_base 8: mod_base = OTHER; note = 2'-O-methylcytidine-3'-phosphate
  modified_base 9: mod_base = OTHER; note = 2'-fluoroadenosine-3'-phosphate
  modified_base 10: mod_base = OTHER; note = 2'-fluorocytidine-3'-phosphate
  modified_base 11: mod_base = OTHER; note = 2'-fluoroadenosine-3'-phosphate
  modified_base 12: mod_base = OTHER; note = 2'-O-methyladenosine-3'-phosphate
  modified_base 13: mod_base = OTHER; note = 2'-fluorouridine-3'-phosphate
  modified_base 14: mod_base = OTHER; note = 2'-O-methyladenosine-3'-phosphate
  modified_base 15: mod_base = OTHER; note = 2'-fluorouridine-3'-phosphate
  modified_base 16: mod_base = OTHER; note = 2'-O-methyluridine-3'-phosphate
  modified_base 17: mod_base = OTHER; note = 2'-fluorouridine-3'-phosphate
  modified_base 18: mod_base = OTHER; note = 2'-O-methyluridine-3'-phosphate
  modified_base 19: mod_base = OTHER; note = 2'-fluorocytidine-3'-phosphate
  modified_base 20: mod_base = OTHER; note = 2'-O-methylcytidine-3'-phosphate
  modified_base 21: mod_base = OTHER; note = 2'-fluoroadenosine-3'-phosphate N-[tris(GalNAc-alkyl)-amidodecanoyl)]-4-hydroxyprolinol Hyp-(GalNAc-alkyl)3
gacagtgcacaatattttcca

SEQ ID NO: 4147 - RNA, 21 nt, synthetic construct
  source 1..21: mol_type = other RNA; note = Description of Artificial Sequence: Synthetic oligonucleotide
  modified_base 1: mod_base = OTHER; note = 2'-fluoroadenosine-3'-phosphorothioate
  modified_base 2: mod_base = OTHER; note = 2'-O-methylcytidine-3'-phosphorothioate
  modified_base 3: mod_base = OTHER; note = 2'-fluorouridine-3'-phosphate
  modified_base 4: mod_base = OTHER; note = 2'-O-methyluridine-3'-phosphate
  modified_base 5: mod_base = OTHER; note = 2'-fluorouridine-3'-phosphate
  modified_base 6: mod_base = OTHER; note = 2'-O-methyluridine-3'-phosphate
  modified_base 7: mod_base = OTHER; note = 2'-fluorocytidine-3'-phosphate
  modified_base 8: mod_base = OTHER; note = 2'-O-methyladenosine-3'-phosphate
  modified_base 9: mod_base = OTHER; note = 2'-fluoroadenosine-3'-phosphate
  modified_base 10: mod_base = OTHER; note = 2'-fluorouridine-3'-phosphate
  modified_base 11: mod_base = OTHER; note = 2'-fluoroguanosine-3'-phosphate
  modified_base 12: mod_base = OTHER; note = 2'-O-methylguanosine-3'-phosphate
  modified_base 13: mod_base = OTHER; note = 2'-fluoroguanosine-3'-phosphate
  modified_base 14: mod_base = OTHER; note = 2'-O-methyluridine-3'-phosphate
  modified_base 15: mod_base = OTHER; note = 2'-fluoroguanosine-3'-phosphate
  modified_base 16: mod_base = OTHER; note = 2'-O-methyluridine-3'-phosphate
  modified_base 17: mod_base = OTHER; note = 2'-fluorocytidine-3'-phosphate
  modified_base 18: mod_base = OTHER; note = 2'-O-methylcytidine-3'-phosphate
  modified_base 19: mod_base = OTHER; note = 2'-fluorouridine-3'-phosphate
  modified_base 20: mod_base = OTHER; note = 2'-O-methyladenosine-3'-phosphate
  modified_base 21: mod_base = OTHER; note = 2'-fluoroadenosine-3'-phosphate N-[tris(GalNAc-alkyl)-amidodecanoyl)]-4-hydroxyprolinol Hyp-(GalNAc-alkyl)3
acttttcaatgggtgtcctaa

SEQ ID NO: 4148 - RNA, 21 nt, synthetic construct
  source 1..21: mol_type = other RNA; note = Description of Artificial Sequence: Synthetic oligonucleotide
  modified_base 1: mod_base = OTHER; note = 2'-fluoroadenosine-3'-phosphorothioate
  modified_base 2: mod_base = OTHER; note = 2'-O-methyladenosine-3'-phosphorothioate
  modified_base 3: mod_base = OTHER; note = 2'-fluoroguanosine-3'-phosphate
  modified_base 4: mod_base = OTHER; note = 2'-O-methyluridine-3'-phosphate
  modified_base 5: mod_base = OTHER; note = 2'-fluorocytidine-3'-phosphate
  modified_base 6: mod_base = OTHER; note = 2'-O-methyladenosine-3'-phosphate
  modified_base 7: mod_base = OTHER; note = 2'-fluorouridine-3'-phosphate
  modified_base 8: mod_base = OTHER; note = 2'-O-methylcytidine-3'-phosphate
  modified_base 9: mod_base = OTHER; note = 2'-fluoroguanosine-3'-phosphate
  modified_base 10: mod_base = OTHER; note = 2'-fluoroadenosine-3'-phosphate
  modified_base 11: mod_base = OTHER; note = 2'-fluorocytidine-3'-phosphate
  modified_base 12: mod_base = OTHER; note = 2'-O-methyladenosine-3'-phosphate
  modified_base 13: mod_base = OTHER; note = 2'-fluoroadenosine-3'-phosphate
  modified_base 14: mod_base = OTHER; note = 2'-O-methylguanosine-3'-phosphate
  modified_base 15: mod_base = OTHER; note = 2'-fluoroadenosine-3'-phosphate
  modified_base 16: mod_base = OTHER; note = 2'-O-methylcytidine-3'-phosphate
  modified_base 17: mod_base = OTHER; note = 2'-fluoroadenosine-3'-phosphate
  modified_base 18: mod_base = OTHER; note = 2'-O-methyluridine-3'-phosphate
  modified_base 19: mod_base = OTHER; note = 2'-fluorouridine-3'-phosphate
  modified_base 20: mod_base = OTHER; note = 2'-O-methylguanosine-3'-phosphate
  modified_base 21: mod_base = OTHER; note = 2'-fluoroadenosine-3'-phosphate N-[tris(GalNAc-alkyl)-amidodecanoyl)]-4-hydroxyprolinol Hyp-(GalNAc-alkyl)3
aagtcatcgacaagacattga

SEQ ID NO: 4149 - RNA, 21 nt, synthetic construct
  source 1..21: mol_type = other RNA; note = Description of Artificial Sequence: Synthetic oligonucleotide
  modified_base 1: mod_base = OTHER; note = 2'-fluoroadenosine-3'-phosphorothioate
  modified_base 2: mod_base = OTHER; note = 2'-O-methyluridine-3'-phosphorothioate
  modified_base 3: mod_base = OTHER; note = 2'-fluorocytidine-3'-phosphate
  modified_base 4: mod_base = OTHER; note = 2'-O-methylguanosine-3'-phosphate
  modified_base 5: mod_base = OTHER; note = 2'-fluoroadenosine-3'-phosphate
  modified_base 6: mod_base = OTHER; note = 2'-O-methylcytidine-3'-phosphate
  modified_base 7: mod_base = OTHER; note = 2'-fluoroadenosine-3'-phosphate
  modified_base 8: mod_base = OTHER; note = 2'-O-methyladenosine-3'-phosphate
  modified_base 9: mod_base = OTHER; note = 2'-fluoroguanosine-3'-phosphate
  modified_base 10: mod_base = OTHER; note = 2'-fluoroadenosine-3'-phosphate
  modified_base 11: mod_base = OTHER; note = 2'-fluorocytidine-3'-phosphate
  modified_base 12: mod_base = OTHER; note = 2'-O-methyladenosine-3'-phosphate
  modified_base 13: mod_base = OTHER; note = 2'-fluorouridine-3'-phosphate
  modified_base 14: mod_base = OTHER; note = 2'-O-methyluridine-3'-phosphate
  modified_base 15: mod_base = OTHER; note = 2'-fluoroguanosine-3'-phosphate
  modified_base 16: mod_base = OTHER; note = 2'-O-methylguanosine-3'-phosphate
  modified_base 17: mod_base = OTHER; note = 2'-fluorouridine-3'-phosphate
  modified_base 18: mod_base = OTHER; note = 2'-O-methylguanosine-3'-phosphate
  modified_base 19: mod_base = OTHER; note = 2'-fluoroadenosine-3'-phosphate
  modified_base 20: mod_base = OTHER; note = 2'-O-methylguanosine-3'-phosphate
  modified_base 21: mod_base = OTHER; note = 2'-fluoroadenosine-3'-phosphate N-[tris(GalNAc-alkyl)-amidodecanoyl)]-4-hydroxyprolinol Hyp-(GalNAc-alkyl)3
atcgacaagacattggtgaga

SEQ ID NO: 4150 - RNA, 21 nt, synthetic construct
  source 1..21: mol_type = other RNA; note = Description of Artificial Sequence: Synthetic oligonucleotide
  modified_base 1: mod_base = OTHER; note = 2'-fluoroguanosine-3'-phosphorothioate
  modified_base 2: mod_base = OTHER; note = 2'-O-methylguanosine-3'-phosphorothioate
  modified_base 3: mod_base = OTHER; note = 2'-fluoroguanosine-3'-phosphate
  modified_base 4: mod_base = OTHER; note = 2'-O-methyladenosine-3'-phosphate
  modified_base 5: mod_base = OTHER; note = 2'-fluoroguanosine-3'-phosphate
  modified_base 6: mod_base = OTHER; note = 2'-O-methyladenosine-3'-phosphate
  modified_base 7: mod_base = OTHER; note = 2'-fluoroadenosine-3'-phosphate
  modified_base 8: mod_base = OTHER; note = 2'-O-methyladenosine-3'-phosphate
  modified_base 9: mod_base = OTHER; note = 2'-fluoroguanosine-3'-phosphate
  modified_base 10: mod_base = OTHER; note = 2'-fluoroguanosine-3'-phosphate
  modified_base 11: mod_base = OTHER; note = 2'-fluorouridine-3'-phosphate
  modified_base 12: mod_base = OTHER; note = 2'-O-methylguanosine-3'-phosphate
  modified_base 13: mod_base = OTHER; note = 2'-fluorouridine-3'-phosphate
  modified_base 14: mod_base = OTHER; note = 2'-O-methyluridine-3'-phosphate
  modified_base 15: mod_base = OTHER; note = 2'-fluorocytidine-3'-phosphate
  modified_base 16: mod_base = OTHER; note = 2'-O-methyladenosine-3'-phosphate
  modified_base 17: mod_base = OTHER; note = 2'-fluoroadenosine-3'-phosphate
  modified_base 18: mod_base = OTHER; note = 2'-O-methylguanosine-3'-phosphate
  modified_base 19: mod_base = OTHER; note = 2'-fluoroadenosine-3'-phosphate
  modified_base 20: mod_base = OTHER; note = 2'-O-methyluridine-3'-phosphate
  modified_base 21: mod_base = OTHER; note = 2'-fluoroadenosine-3'-phosphate N-[tris(GalNAc-alkyl)-amidodecanoyl)]-4-hydroxyprolinol Hyp-(GalNAc-alkyl)3
gggagaaaggtgttcaagata

SEQ ID NO: 4151 - protein, 11 aa, unidentified
  source 1..11: note = Description of Unknown: RFGF Analogue Peptide
AALLPVLLAAP

SEQ ID NO: 4152 - protein, 13 aa, Human immunodeficiency virus
GRKKRRQRRRPPQ

SEQ ID NO: 4153 - protein, 16 aa, Drosophila sp.
RQIKIWFQNRRMKWKK

SEQ ID NO: 4154 - protein, 16 aa, unidentified
  source 1..16: note = Description of Unknown:RFGF Peptide
AAVALLPAVLLALLAP

SEQ ID NO: 4155 - DNA, 20 bp, synthetic construct
  source 1..20: mol_type = other DNA; note = Description of Artificial Sequence: Synthetic oligonucleotide; note = Description of Combined DNA/RNA Molecule: Synthetic oligonucleotide
  modified_base 1: mod_base = OTHER; note = 2'-O-methylguanosine-3'-phosphorothioate
  modified_base 2: mod_base = OTHER; note = 2'-O-methylguanosine-3'-phosphorothioate
  modified_base 3: mod_base = OTHER; note = 2'-O-methylguanosine-3'-phosphorothioate
  modified_base 4: mod_base = OTHER; note = 2'-O-methyladenosine-3'-phosphorothioate
  modified_base 5: mod_base = OTHER; note = 2'-O-methylguanosine-3'-phosphorothioate
  modified_base 6: mod_base = OTHER; note = 5'-methyl-deoxycytidine-3'-phosphorothioate
  modified_base 7: mod_base = OTHER; note = 2'-deoxyadenosine-3'-phosphorothioate
  modified_base 8: mod_base = OTHER; note = 2'-deoxythymidine-3'-phosphorothioate
  modified_base 9: mod_base = OTHER; note = 2'-deoxythymidine-3'-phosphorothioate
  modified_base 10: mod_base = OTHER; note = 2'-deoxythymidine-3'-phosphorothioate
  modified_base 11: mod_base = OTHER; note = 2'-deoxythymidine-3'-phosphorothioate
  modified_base 12: mod_base = OTHER; note = 5'-methyl-deoxycytidine-3'-phosphorothioate
  modified_base 13: mod_base = OTHER; note = 2'-deoxyadenosine-3'-phosphorothioate
  modified_base 14: mod_base = OTHER; note = 5'-methyl-deoxycytidine-3'-phosphorothioate
  modified_base 15: mod_base = OTHER; note = 2'-deoxyadenosine-3'-phosphorothioate
  modified_base 16: mod_base = OTHER; note = 2'-O-methylguanosine-3'-phosphorothioate
  modified_base 17: mod_base = OTHER; note = 2'-O-methylguanosine-3'-phosphorothioate
  modified_base 18: mod_base = OTHER; note = 2'-O-methyluridine-3'-phosphorothioate
  modified_base 19: mod_base = OTHER; note = 2'-O-methyluridine-3'-phosphorothioate
  modified_base 20: mod_base = OTHER; note = 2'-O-methyladenosine-3'-phosphate
  misc_feature 1..5: note = RNA
  misc_feature 6..15: note = DNA
  misc_feature 16..20: note = RNA
gggagcattttcacaggtta

SEQ ID NO: 4156 - DNA, 20 bp, synthetic construct
  source 1..20: mol_type = other DNA; note = Description of Artificial Sequence: Synthetic oligonucleotide; note = Description of Combined DNA/RNA Molecule: Synthetic oligonucleotide
  modified_base 1: mod_base = OTHER; note = 2'-O-methyladenosine-3'-phosphorothioate
  modified_base 2: mod_base = OTHER; note = 2'-O-methyladenosine-3'-phosphorothioate
  modified_base 3: mod_base = OTHER; note = 2'-O-methyluridine-3'-phosphorothioate
  modified_base 4: mod_base = OTHER; note = 2'-O-methyluridine-3'-phosphorothioate
  modified_base 5: mod_base = OTHER; note = 2'-O-methyladenosine-3'-phosphorothioate
  modified_base 6: mod_base = OTHER; note = 2'-deoxyguanosine-3'-phosphorothioate
  modified_base 7: mod_base = OTHER; note = 5'-methyl-deoxycytidine-3'-phosphorothioate
  modified_base 8: mod_base = OTHER; note = 5'-methyl-deoxycytidine-3'-phosphorothioate
  modified_base 9: mod_base = OTHER; note = 2'-deoxyguanosine-3'-phosphorothioate
  modified_base 10: mod_base = OTHER; note = 2'-deoxyguanosine-3'-phosphorothioate
  modified_base 11: mod_base = OTHER; note = 2'-deoxyguanosine-3'-phosphorothioate
  modified_base 12: mod_base = OTHER; note = 2'-deoxyguanosine-3'-phosphorothioate
  modified_base 13: mod_base = OTHER; note = 2'-deoxyguanosine-3'-phosphorothioate
  modified_base 14: mod_base = OTHER; note = 2'-deoxyadenosine-3'-phosphorothioate
  modified_base 15: mod_base = OTHER; note = 2'-deoxyguanosine-3'-phosphorothioate
  modified_base 16: mod_base = OTHER; note = 2'-O-methylcytidine-3'-phosphorothioate
  modified_base 17: mod_base = OTHER; note = 2'-O-methyladenosine-3'-phosphorothioate
  modified_base 18: mod_base = OTHER; note = 2'-O-methyluridine-3'-phosphorothioate
  modified_base 19: mod_base = OTHER; note = 2'-O-methyluridine-3'-phosphorothioate
  modified_base 20: mod_base = OTHER; note = 2'-O-methyluridine-3'-phosphate
  misc_feature 1..5: note = RNA
  misc_feature 6..15: note = DNA
  misc_feature 16..20: note = RNA
aattagccgggggagcattt

SEQ ID NO: 4157 - DNA, 20 bp, synthetic construct
  source 1..20: mol_type = other DNA; note = Description of Artificial Sequence: Synthetic oligonucleotide; note = Description of Combined DNA/RNA Molecule: Synthetic oligonucleotide
  modified_base 1: mod_base = OTHER; note = 2'-O-methyladenosine-3'-phosphorothioate
  modified_base 2: mod_base = OTHER; note = 2'-O-methyluridine-3'-phosphorothioate
  modified_base 3: mod_base = OTHER; note = 2'-O-methylcytidine-3'-phosphorothioate
  modified_base 4: mod_base = OTHER; note = 2'-O-methyladenosine-3'-phosphorothioate
  modified_base 5: mod_base = OTHER; note = 2'-O-methyluridine-3'-phosphorothioate
  modified_base 6: mod_base = OTHER; note = 2'-deoxythymidine-3'-phosphorothioate
  modified_base 7: mod_base = OTHER; note = 2'-deoxyguanosine-3'-phosphorothioate
  modified_base 8: mod_base = OTHER; note = 2'-deoxyadenosine-3'-phosphorothioate
  modified_base 9: mod_base = OTHER; note = 2'-deoxythymidine-3'-phosphorothioate
  modified_base 10: mod_base = OTHER; note = 2'-deoxyadenosine-3'-phosphorothioate
  modified_base 11: mod_base = OTHER; note = 5'-methyl-deoxycytidine-3'-phosphorothioate
  modified_base 12: mod_base = OTHER; note = 2'-deoxyadenosine-3'-phosphorothioate
  modified_base 13: mod_base = OTHER; note = 2'-deoxyadenosine-3'-phosphorothioate
  modified_base 14: mod_base = OTHER; note = 2'-deoxyadenosine-3'-phosphorothioate
  modified_base 15: mod_base = OTHER; note = 2'-deoxythymidine-3'-phosphorothioate
  modified_base 16: mod_base = OTHER; note = 2'-O-methyluridine-3'-phosphorothioate
  modified_base 17: mod_base = OTHER; note = 2'-O-methyladenosine-3'-phosphorothioate
  modified_base 18: mod_base = OTHER; note = 2'-O-methylguanosine-3'-phosphorothioate
  modified_base 19: mod_base = OTHER; note = 2'-O-methylcytidine-3'-phosphorothioate
  modified_base 20: mod_base = OTHER; note = 2'-O-methylcytidine-3'-phosphate
  misc_feature 1..5: note = RNA
  misc_feature 6..15: note = DNA
  misc_feature 16..20: note = RNA
atcattgatacaaattagcc

SEQ ID NO: 4158 - DNA, 20 bp, synthetic construct
  source 1..20: mol_type = other DNA; note = Description of Artificial Sequence: Synthetic oligonucleotide; note = Description of Combined DNA/RNA Molecule: Synthetic oligonucleotide
  modified_base 1: mod_base = OTHER; note = 2'-O-methylguanosine-3'-phosphorothioate
  modified_base 2: mod_base = OTHER; note = 2'-O-methyluridine-3'-phosphorothioate
  modified_base 3: mod_base = OTHER; note = 2'-O-methyluridine-3'-phosphorothioate
  modified_base 4: mod_base = OTHER; note = 2'-O-methylguanosine-3'-phosphorothioate
  modified_base 5: mod_base = OTHER; note = 2'-O-methyluridine-3'-phosphorothioate
  modified_base 6: mod_base = OTHER; note = 2'-deoxythymidine-3'-phosphorothioate
  modified_base 7: mod_base = OTHER; note = 5'-methyl-deoxycytidine-3'-phosphorothioate
  modified_base 8: mod_base = OTHER; note = 2'-deoxyadenosine-3'-phosphorothioate
  modified_base 9: mod_base = OTHER; note = 2'-deoxythymidine-3'-phosphorothioate
  modified_base 10: mod_base = OTHER; note = 2'-deoxyadenosine-3'-phosphorothioate
  modified_base 11: mod_base = OTHER; note = 2'-deoxyadenosine-3'-phosphorothioate
  modified_base 12: mod_base = OTHER; note = 2'-deoxythymidine-3'-phosphorothioate
  modified_base 13: mod_base = OTHER; note = 5'-methyl-deoxycytidine-3'-phosphorothioate
  modified_base 14: mod_base = OTHER; note = 2'-deoxyadenosine-3'-phosphorothioate
  modified_base 15: mod_base = OTHER; note = 2'-deoxythymidine-3'-phosphorothioate
  modified_base 16: mod_base = OTHER; note = 2'-O-methyluridine-3'-phosphorothioate
  modified_base 17: mod_base = OTHER; note = 2'-O-methylguanosine-3'-phosphorothioate
  modified_base 18: mod_base = OTHER; note = 2'-O-methyladenosine-3'-phosphorothioate
  modified_base 19: mod_base = OTHER; note = 2'-O-methyluridine-3'-phosphorothioate
  modified_base 20: mod_base = OTHER; note = 2'-O-methyladenosine-3'-phosphate
  misc_feature 1..5: note = RNA
  misc_feature 6..15: note = DNA
  misc_feature 16..20: note = RNA
gttgttcataatcattgata

SEQ ID NO: 4159 - DNA, 20 bp, synthetic construct
  source 1..20: mol_type = other DNA; note = Description of Artificial Sequence: Synthetic oligonucleotide; note = Description of Combined DNA/RNA Molecule: Synthetic oligonucleotide
  modified_base 1: mod_base = OTHER; note = 2'-O-methylguanosine-3'-phosphorothioate
  modified_base 2: mod_base = OTHER; note = 2'-O-methyladenosine-3'-phosphorothioate
  modified_base 3: mod_base = OTHER; note = 2'-O-methyluridine-3'-phosphorothioate
  modified_base 4: mod_base = OTHER; note = 2'-O-methyluridine-3'-phosphorothioate
  modified_base 5: mod_base = OTHER; note = 2'-O-methyluridine-3'-phosphorothioate
  modified_base 6: mod_base = OTHER; note = 2'-deoxyadenosine-3'-phosphorothioate
  modified_base 7: mod_base = OTHER; note = 2'-deoxyguanosine-3'-phosphorothioate
  modified_base 8: mod_base = OTHER; note = 5'-methyl-deoxycytidine-3'-phosphorothioate
  modified_base 9: mod_base = OTHER; note = 2'-deoxyadenosine-3'-phosphorothioate
  modified_base 10: mod_base = OTHER; note = 2'-deoxythymidine-3'-phosphorothioate
  modified_base 11: mod_base = OTHER; note = 2'-deoxyguanosine-3'-phosphorothioate
  modified_base 12: mod_base = OTHER; note = 2'-deoxythymidine-3'-phosphorothioate
  modified_base 13: mod_base = OTHER; note = 2'-deoxythymidine-3'-phosphorothioate
  modified_base 14: mod_base = OTHER; note = 2'-deoxyguanosine-3'-phosphorothioate
  modified_base 15: mod_base = OTHER; note = 2'-deoxythymidine-3'-phosphorothioate
  modified_base 16: mod_base = OTHER; note = 2'-O-methyluridine-3'-phosphorothioate
  modified_base 17: mod_base = OTHER; note = 2'-O-methylcytidine-3'-phosphorothioate
  modified_base 18: mod_base = OTHER; note = 2'-O-methyladenosine-3'-phosphorothioate
  modified_base 19: mod_base = OTHER; note = 2'-O-methyluridine-3'-phosphorothioate
  modified_base 20: mod_base = OTHER; note = 2'-O-methyladenosine-3'-phosphate
  misc_feature 1..5: note = RNA
  misc_feature 6..15: note = DNA
  misc_feature 16..20: note = RNA
gatttagcatgttgttcata

SEQ ID NO: 4160 - DNA, 20 bp, synthetic construct
  source 1..20: mol_type = other DNA; note = Description of Artificial Sequence: Synthetic oligonucleotide; note = Description of Combined DNA/RNA Molecule: Synthetic oligonucleotide
  modified_base 1: mod_base = OTHER; note = 2'-O-methyluridine-3'-phosphorothioate
  modified_base 2: mod_base = OTHER; note = 2'-O-methyluridine-3'-phosphorothioate
  modified_base 3: mod_base = OTHER; note = 2'-O-methylguanosine-3'-phosphorothioate
  modified_base 4: mod_base = OTHER; note = 2'-O-methylguanosine-3'-phosphorothioate
  modified_base 5: mod_base = OTHER; note = 2'-O-methyladenosine-3'-phosphorothioate
  modified_base 6: mod_base = OTHER; note = 2'-deoxyadenosine-3'-phosphorothioate
  modified_base 7: mod_base = OTHER; note = 2'-deoxyguanosine-3'-phosphorothioate
  modified_base 8: mod_base = OTHER; note = 2'-deoxythymidine-3'-phosphorothioate
  modified_base 9: mod_base = OTHER; note = 2'-deoxyadenosine-3'-phosphorothioate
  modified_base 10: mod_base = OTHER; note = 5'-methyl-deoxycytidine-3'-phosphorothioate
  modified_base 11: mod_base = OTHER; note = 2'-deoxythymidine-3'-phosphorothioate
  modified_base 12: mod_base = OTHER; note = 2'-deoxyguanosine-3'-phosphorothioate
  modified_base 13: mod_base = OTHER; note = 2'-deoxyadenosine-3'-phosphorothioate
  modified_base 14: mod_base = OTHER; note = 2'-deoxythymidine-3'-phosphorothioate
  modified_base 15: mod_base = OTHER; note = 2'-deoxythymidine-3'-phosphorothioate
  modified_base 16: mod_base = OTHER; note = 2'-O-methyluridine-3'-phosphorothioate
  modified_base 17: mod_base = OTHER; note = 2'-O-methyladenosine-3'-phosphorothioate
  modified_base 18: mod_base = OTHER; note = 2'-O-methylguanosine-3'-phosphorothioate
  modified_base 19: mod_base = OTHER; note = 2'-O-methylcytidine-3'-phosphorothioate
  modified_base 20: mod_base = OTHER; note = 2'-O-methyladenosine-3'-phosphate
  misc_feature 1..5: note = RNA
  misc_feature 6..15: note = DNA
  misc_feature 16..20: note = RNA
ttggaagtactgatttagca

SEQ ID NO: 4161 - DNA, 20 bp, synthetic construct
  source 1..20: mol_type = other DNA; note = Description of Artificial Sequence: Synthetic oligonucleotide; note = Description of Combined DNA/RNA Molecule: Synthetic oligonucleotide
  modified_base 1: mod_base = OTHER; note = 2'-O-methylcytidine-3'-phosphorothioate
  modified_base 2: mod_base = OTHER; note = 2'-O-methyladenosine-3'-phosphorothioate
  modified_base 3: mod_base = OTHER; note = 2'-O-methyluridine-3'-phosphorothioate
  modified_base 4: mod_base = OTHER; note = 2'-O-methyladenosine-3'-phosphorothioate
  modified_base 5: mod_base = OTHER; note = 2'-O-methyluridine-3'-phosphorothioate
  modified_base 6: mod_base = OTHER; note = 2'-deoxyadenosine-3'-phosphorothioate
  modified_base 7: mod_base = OTHER; note = 2'-deoxythymidine-3'-phosphorothioate
  modified_base 8: mod_base = OTHER; note = 2'-deoxyadenosine-3'-phosphorothioate
  modified_base 9: mod_base = OTHER; note = 2'-deoxyguanosine-3'-phosphorothioate
  modified_base 10: mod_base = OTHER; note = 2'-deoxyadenosine-3'-phosphorothioate
  modified_base 11: mod_base = OTHER; note = 5'-methyl-deoxycytidine-3'-phosphorothioate
  modified_base 12: mod_base = OTHER; note = 2'-deoxythymidine-3'-phosphorothioate
  modified_base 13: mod_base = OTHER; note = 2'-deoxythymidine-3'-phosphorothioate
  modified_base 14: mod_base = OTHER; note = 2'-deoxythymidine-3'-phosphorothioate
  modified_base 15: mod_base = OTHER; note = 2'-deoxyguanosine-3'-phosphorothioate
  modified_base 16: mod_base = OTHER; note = 2'-O-methylguanosine-3'-phosphorothioate
  modified_base 17: mod_base = OTHER; note = 2'-O-methyladenosine-3'-phosphorothioate
  modified_base 18: mod_base = OTHER; note = 2'-O-methyladenosine-3'-phosphorothioate
  modified_base 19: mod_base = OTHER; note = 2'-O-methylguanosine-3'-phosphorothioate
  modified_base 20: mod_base = OTHER; note = 2'-O-methyluridine-3'-phosphate
  misc_feature 1..5: note = RNA
  misc_feature 6..15: note = DNA
  misc_feature 16..20: note = RNA
catatatagactttggaagt

SEQ ID NO: 4162 - DNA, 20 bp, synthetic construct
  source 1..20: mol_type = other DNA; note = Description of Artificial Sequence: Synthetic oligonucleotide; note = Description of Combined DNA/RNA Molecule: Synthetic oligonucleotide
  modified_base 1: mod_base = OTHER; note = 2'-O-methylcytidine-3'-phosphorothioate
  modified_base 2: mod_base = OTHER; note = 2'-O-methyluridine-3'-phosphorothioate
  modified_base 3: mod_base = OTHER; note = 2'-O-methylguanosine-3'-phosphorothioate
  modified_base 4: mod_base = OTHER; note = 2'-O-methyluridine-3'-phosphorothioate
  modified_base 5: mod_base = OTHER; note = 2'-O-methyladenosine-3'-phosphorothioate
  modified_base 6: mod_base = OTHER; note = 2'-deoxyadenosine-3'-phosphorothioate
  modified_base 7: mod_base = OTHER; note = 2'-deoxythymidine-3'-phosphorothioate
  modified_base 8: mod_base = OTHER; note = 2'-deoxyadenosine-3'-phosphorothioate
  modified_base 9: mod_base = OTHER; note = 2'-deoxyguanosine-3'-phosphorothioate
  modified_base 10: mod_base = OTHER; note = 2'-deoxythymidine-3'-phosphorothioate
  modified_base 11: mod_base = OTHER; note = 5'-methyl-deoxycytidine-3'-phosphorothioate
  modified_base 12: mod_base = OTHER; note = 2'-deoxyadenosine-3'-phosphorothioate
  modified_base 13: mod_base = OTHER; note = 2'-deoxythymidine-3'-phosphorothioate
  modified_base 14: mod_base = OTHER; note = 2'-deoxyadenosine-3'-phosphorothioate
  modified_base 15: mod_base = OTHER; note = 2'-deoxythymidine-3'-phosphorothioate
  modified_base 16: mod_base = OTHER; note = 2'-O-methyladenosine-3'-phosphorothioate
  modified_base 17: mod_base = OTHER; note = 2'-O-methyluridine-3'-phosphorothioate
  modified_base 18: mod_base = OTHER; note = 2'-O-methyladenosine-3'-phosphorothioate
  modified_base 19: mod_base = OTHER; note = 2'-O-methylguanosine-3'-phosphorothioate
  modified_base 20: mod_base = OTHER; note = 2'-O-methyladenosine-3'-phosphate
  misc_feature 1..5: note = RNA
  misc_feature 6..15: note = DNA
  misc_feature 16..20: note = RNA
ctgtaatagtcatatataga

SEQ ID NO: 4163 - DNA, 20 bp, synthetic construct
  source 1..20: mol_type = other DNA; note = Description of Artificial Sequence: Synthetic oligonucleotide; note = Description of Combined DNA/RNA Molecule: Synthetic oligonucleotide
  modified_base 1: mod_base = OTHER; note = 2'-O-methyluridine-3'-phosphorothioate
  modified_base 2: mod_base = OTHER; note = 2'-O-methyluridine-3'-phosphorothioate
  modified_base 3: mod_base = OTHER; note = 2'-O-methylguanosine-3'-phosphorothioate
  modified_base 4: mod_base = OTHER; note = 2'-O-methylcytidine-3'-phosphorothioate
  modified_base 5: mod_base = OTHER; note = 2'-O-methylcytidine-3'-phosphorothioate
  modified_base 6: mod_base = OTHER; note = 5'-methyl-deoxycytidine-3'-phosphorothioate
  modified_base 7: mod_base = OTHER; note = 5'-methyl-deoxycytidine-3'-phosphorothioate
  modified_base 8: mod_base = OTHER; note = 2'-deoxyadenosine-3'-phosphorothioate
  modified_base 9: mod_base = OTHER; note = 2'-deoxyguanosine-3'-phosphorothioate
  modified_base 10: mod_base = OTHER; note = 2'-deoxyadenosine-3'-phosphorothioate
  modified_base 11: mod_base = OTHER; note = 5'-methyl-deoxycytidine-3'-phosphorothioate
  modified_base 12: mod_base = OTHER; note = 5'-methyl-deoxycytidine-3'-phosphorothioate
  modified_base 13: mod_base = OTHER; note = 2'-deoxythymidine-3'-phosphorothioate
  modified_base 14: mod_base = OTHER; note = 2'-deoxyguanosine-3'-phosphorothioate
  modified_base 15: mod_base = OTHER; note = 2'-deoxythymidine-3'-phosphorothioate
  modified_base 16: mod_base = OTHER; note = 2'-O-methyladenosine-3'-phosphorothioate
  modified_base 17: mod_base = OTHER; note = 2'-O-methyladenosine-3'-phosphorothioate
  modified_base 18: mod_base = OTHER; note = 2'-O-methyluridine-3'-phosphorothioate
  modified_base 19: mod_base = OTHER; note = 2'-O-methyladenosine-3'-phosphorothioate
  modified_base 20: mod_base = OTHER; note = 2'-O-methylguanosine-3'-phosphate
  misc_feature 1..5: note = RNA
  misc_feature 6..15: note = DNA
  misc_feature 16..20: note = RNA
ttgccccagacctgtaatag

SEQ ID NO: 4164 - DNA, 20 bp, synthetic construct
  source 1..20: mol_type = other DNA; note = Description of Artificial Sequence: Synthetic oligonucleotide; note = Description of Combined DNA/RNA Molecule: Synthetic oligonucleotide
  modified_base 1: mod_base = OTHER; note = 2'-O-methyluridine-3'-phosphorothioate
  modified_base 2: mod_base = OTHER; note = 2'-O-methyluridine-3'-phosphorothioate
  modified_base 3: mod_base = OTHER; note = 2'-O-methylcytidine-3'-phosphorothioate
  modified_base 4: mod_base = OTHER; note = 2'-O-methyluridine-3'-phosphorothioate
  modified_base 5: mod_base = OTHER; note = 2'-O-methyluridine-3'-phosphorothioate
  modified_base 6: mod_base = OTHER; note = 5'-methyl-deoxycytidine-3'-phosphorothioate
  modified_base 7: mod_base = OTHER; note = 2'-deoxyadenosine-3'-phosphorothioate
  modified_base 8: mod_base = OTHER; note = 2'-deoxythymidine-3'-phosphorothioate
  modified_base 9: mod_base = OTHER; note = 5'-methyl-deoxycytidine-3'-phosphorothioate
  modified_base 10: mod_base = OTHER; note = 2'-deoxyadenosine-3'-phosphorothioate
  modified_base 11: mod_base = OTHER; note = 2'-deoxythymidine-3'-phosphorothioate
  modified_base 12: mod_base = OTHER; note = 2'-deoxythymidine-3'-phosphorothioate
  modified_base 13: mod_base = OTHER; note = 2'-deoxythymidine-3'-phosphorothioate
  modified_base 14: mod_base = OTHER; note = 2'-deoxyguanosine-3'-phosphorothioate
  modified_base 15: mod_base = OTHER; note = 5'-methyl-deoxycytidine-3'-phosphorothioate
  modified_base 16: mod_base = OTHER; note = 2'-O-methylcytidine-3'-phosphorothioate
  modified_base 17: mod_base = OTHER; note = 2'-O-methylcytidine-3'-phosphorothioate
  modified_base 18: mod_base = OTHER; note = 2'-O-methylcytidine-3'-phosphorothioate
  modified_base 19: mod_base = OTHER; note = 2'-O-methyladenosine-3'-phosphorothioate
  modified_base 20: mod_base = OTHER; note = 2'-O-methylguanosine-3'-phosphate
  misc_feature 1..5: note = RNA
  misc_feature 6..15: note = DNA
  misc_feature 16..20: note = RNA
ttcttcatcatttgccccag

SEQ ID NO: 4165 - DNA, 20 bp, synthetic construct
  source 1..20: mol_type = other DNA; note = Description of Artificial Sequence: Synthetic oligonucleotide; note = Description of Combined DNA/RNA Molecule: Synthetic oligonucleotide
  modified_base 1: mod_base = OTHER; note = 2'-O-methyluridine-3'-phosphorothioate
  modified_base 2: mod_base = OTHER; note = 2'-O-methyladenosine-3'-phosphorothioate
  modified_base 3: mod_base = OTHER; note = 2'-O-methyluridine-3'-phosphorothioate
  modified_base 4: mod_base = OTHER; note = 2'-O-methylcytidine-3'-phosphorothioate
  modified_base 5: mod_base = OTHER; note = 2'-O-methyladenosine-3'-phosphorothioate
  modified_base 6: mod_base = OTHER; note = 2'-deoxyguanosine-3'-phosphorothioate
  modified_base 7: mod_base = OTHER; note = 5'-methyl-deoxycytidine-3'-phosphorothioate
  modified_base 8: mod_base = OTHER; note = 5'-methyl-deoxycytidine-3'-phosphorothioate
  modified_base 9: mod_base = OTHER; note = 2'-deoxyadenosine-3'-phosphorothioate
  modified_base 10: mod_base = OTHER; note = 2'-deoxyadenosine-3'-phosphorothioate
  modified_base 11: mod_base = OTHER; note = 2'-deoxyadenosine-3'-phosphorothioate
  modified_base 12: mod_base = OTHER; note = 2'-deoxyguanosine-3'-phosphorothioate
  modified_base 13: mod_base = OTHER; note = 2'-deoxythymidine-3'-phosphorothioate
  modified_base 14: mod_base = OTHER; note = 2'-deoxythymidine-3'-phosphorothioate
  modified_base 15: mod_base = OTHER; note = 2'-deoxythymidine-3'-phosphorothioate
  modified_base 16: mod_base = OTHER; note = 2'-O-methylcytidine-3'-phosphorothioate
  modified_base 17: mod_base = OTHER; note = 2'-O-methyluridine-3'-phosphorothioate
  modified_base 18: mod_base = OTHER; note = 2'-O-methyluridine-3'-phosphorothioate
  modified_base 19: mod_base = OTHER; note = 2'-O-methylcytidine-3'-phosphorothioate
  modified_base 20: mod_base = OTHER; note = 2'-O-methyladenosine-3'-phosphate
  misc_feature 1..5: note = RNA
  misc_feature 6..15: note = DNA
  misc_feature 16..20: note = RNA
tatcagccaaagtttcttca

SEQ ID NO: 4166 - DNA, 20 bp, synthetic construct
  source 1..20: mol_type = other DNA; note = Description of Artificial Sequence: Synthetic oligonucleotide; note = Description of Combined DNA/RNA Molecule: Synthetic oligonucleotide
  modified_base 1: mod_base = OTHER; note = 2'-O-methylguanosine-3'-phosphorothioate
  modified_base 2: mod_base = OTHER; note = 2'-O-methylcytidine-3'-phosphorothioate
  modified_base 3: mod_base = OTHER; note = 2'-O-methyluridine-3'-phosphorothioate
  modified_base 4: mod_base = OTHER; note = 2'-O-methylguanosine-3'-phosphorothioate
  modified_base 5: mod_base = OTHER; note = 2'-O-methylcytidine-3'-phosphorothioate
  modified_base 6: mod_base = OTHER; note = 2'-deoxyadenosine-3'-phosphorothioate
  modified_base 7: mod_base = OTHER; note = 2'-deoxyadenosine-3'-phosphorothioate
  modified_base 8: mod_base = OTHER; note = 2'-deoxythymidine-3'-phosphorothioate
  modified_base 9: mod_base = OTHER; note = 2'-deoxyadenosine-3'-phosphorothioate
  modified_base 10: mod_base = OTHER; note = 2'-deoxythymidine-3'-phosphorothioate
  modified_base 11: mod_base = OTHER; note = 2'-deoxythymidine-3'-phosphorothioate
  modified_base 12: mod_base = OTHER; note = 2'-deoxyadenosine-3'-phosphorothioate
  modified_base 13: mod_base = OTHER; note = 2'-deoxythymidine-3'-phosphorothioate
  modified_base 14: mod_base = OTHER; note = 5'-methyl-deoxycytidine-3'-phosphorothioate
  modified_base 15: mod_base = OTHER; note = 2'-deoxyadenosine-3'-phosphorothioate
  modified_base 16: mod_base = OTHER; note = 2'-O-methylguanosine-3'-phosphorothioate
  modified_base 17: mod_base = OTHER; note = 2'-O-methylcytidine-3'-phosphorothioate
  modified_base 18: mod_base = OTHER; note = 2'-O-methylcytidine-3'-phosphorothioate
  modified_base 19: mod_base = OTHER; note = 2'-O-methyladenosine-3'-phosphorothioate
  modified_base 20: mod_base = OTHER; note = 2'-O-methyladenosine-3'-phosphate
  misc_feature 1..5: note = RNA
  misc_feature 6..15: note = DNA
  misc_feature 16..20: note = RNA
gctgcaatattatcagccaa

SEQ ID NO: 4167 - DNA, 20 bp, synthetic construct
  source 1..20: mol_type = other DNA; note = Description of Artificial Sequence: Synthetic oligonucleotide; note = Description of Combined DNA/RNA Molecule: Synthetic oligonucleotide
  modified_base 1: mod_base = OTHER; note = 2'-O-methyladenosine-3'-phosphorothioate
  modified_base 2: mod_base = OTHER; note = 2'-O-methyluridine-3'-phosphorothioate
  modified_base 3: mod_base = OTHER; note = 2'-O-methylcytidine-3'-phosphorothioate
  modified_base 4: mod_base = OTHER; note = 2'-O-methyluridine-3'-phosphorothioate
  modified_base 5: mod_base = OTHER; note = 2'-O-methylguanosine-3'-phosphorothioate
  modified_base 6: mod_base = OTHER; note = 2'-deoxyguanosine-3'-phosphorothioate
  modified_base 7: mod_base = OTHER; note = 2'-deoxyadenosine-3'-phosphorothioate
  modified_base 8: mod_base = OTHER; note = 2'-deoxyadenosine-3'-phosphorothioate
  modified_base 9: mod_base = OTHER; note = 2'-deoxyadenosine-3'-phosphorothioate
  modified_base 10: mod_base = OTHER; note = 2'-deoxyadenosine-3'-phosphorothioate
  modified_base 11: mod_base = OTHER; note = 2'-deoxythymidine-3'-phosphorothioate
  modified_base 12: mod_base = OTHER; note = 2'-deoxyguanosine-3'-phosphorothioate
  modified_base 13: mod_base = OTHER; note = 5'-methyl-deoxycytidine-3'-phosphorothioate
  modified_base 14: mod_base = OTHER; note = 2'-deoxythymidine-3'-phosphorothioate
  modified_base 15: mod_base = OTHER; note = 2'-deoxyguanosine-3'-phosphorothioate
  modified_base 16: mod_base = OTHER; note = 2'-O-methylcytidine-3'-phosphorothioate
  modified_base 17: mod_base = OTHER; note = 2'-O-methyladenosine-3'-phosphorothioate
  modified_base 18: mod_base = OTHER; note = 2'-O-methyladenosine-3'-phosphorothioate
  modified_base 19: mod_base = OTHER; note = 2'-O-methyluridine-3'-phosphorothioate
  modified_base 20: mod_base = OTHER; note = 2'-O-methyladenosine-3'-phosphate
  misc_feature 1..5: note = RNA
  misc_feature 6..15: note = DNA
  misc_feature 16..20: note = RNA
atctggaaaatgctgcaata

SEQ ID NO: 4168 - DNA, 20 bp, synthetic construct
  source 1..20: mol_type = other DNA; note = Description of Artificial Sequence: Synthetic oligonucleotide; note = Description of Combined DNA/RNA Molecule: Synthetic oligonucleotide
  modified_base 1: mod_base = OTHER; note = 2'-O-methylguanosine-3'-phosphorothioate
  modified_base 2: mod_base = OTHER; note = 2'-O-methyladenosine-3'-phosphorothioate
  modified_base 3: mod_base = OTHER; note = 2'-O-methyluridine-3'-phosphorothioate
  modified_base 4: mod_base = OTHER; note = 2'-O-methyladenosine-3'-phosphorothioate
  modified_base 5: mod_base = OTHER; note = 2'-O-methylcytidine-3'-phosphorothioate
  modified_base 6: mod_base = OTHER; note = 2'-deoxyadenosine-3'-phosphorothioate
  modified_base 7: mod_base = OTHER; note = 2'-deoxyguanosine-3'-phosphorothioate
  modified_base 8: mod_base = OTHER; note = 5'-methyl-deoxycytidine-3'-phosphorothioate
  modified_base 9: mod_base = OTHER; note = 2'-deoxythymidine-3'-phosphorothioate
  modified_base 10: mod_base = OTHER; note = 2'-deoxythymidine-3'-phosphorothioate
  modified_base 11: mod_base = OTHER; note = 5'-methyl-deoxycytidine-3'-phosphorothioate
  modified_base 12: mod_base = OTHER; note = 5'-methyl-deoxycytidine-3'-phosphorothioate
  modified_base 13: mod_base = OTHER; note = 2'-deoxyadenosine-3'-phosphorothioate
  modified_base 14: mod_base = OTHER; note = 2'-deoxythymidine-3'-phosphorothioate
  modified_base 15: mod_base = OTHER; note = 5'-methyl-deoxycytidine-3'-phosphorothioate
  modified_base 16: mod_base = OTHER; note = 2'-O-methyluridine-3'-phosphorothioate
  modified_base 17: mod_base = OTHER; note = 2'-O-methylguanosine-3'-phosphorothioate
  modified_base 18: mod_base = OTHER; note = 2'-O-methylguanosine-3'-phosphorothioate
  modified_base 19: mod_base = OTHER; note = 2'-O-methyladenosine-3'-phosphorothioate
  modified_base 20: mod_base = OTHER; note = 2'-O-methyladenosine-3'-phosphate
  misc_feature 1..5: note = RNA
  misc_feature 6..15: note = DNA
  misc_feature 16..20: note = RNA
gatacagcttccatctggaa

SEQ ID NO: 4169 - DNA, 20 bp, synthetic construct
  source 1..20: mol_type = other DNA; note = Description of Artificial Sequence: Synthetic oligonucleotide; note = Description of Combined DNA/RNA Molecule: Synthetic oligonucleotide
  modified_base 1: mod_base = OTHER; note = 2'-O-methylguanosine-3'-phosphorothioate
  modified_base 2: mod_base = OTHER; note = 2'-O-methyladenosine-3'-phosphorothioate
  modified_base 3: mod_base = OTHER; note = 2'-O-methylguanosine-3'-phosphorothioate
  modified_base 4: mod_base = OTHER; note = 2'-O-methylcytidine-3'-phosphorothioate
  modified_base 5: mod_base = OTHER; note = 2'-O-methyladenosine-3'-phosphorothioate
  modified_base 6: mod_base = OTHER; note = 2'-deoxythymidine-3'-phosphorothioate
  modified_base 7: mod_base = OTHER; note = 5'-methyl-deoxycytidine-3'-phosphorothioate
  modified_base 8: mod_base = OTHER; note = 5'-methyl-deoxycytidine-3'-phosphorothioate
  modified_base 9: mod_base = OTHER; note = 2'-deoxythymidine-3'-phosphorothioate
  modified_base 10: mod_base = OTHER; note = 2'-deoxythymidine-3'-phosphorothioate
  modified_base 11: mod_base = OTHER; note = 2'-deoxyguanosine-3'-phosphorothioate
  modified_base 12: mod_base = OTHER; note = 2'-deoxyguanosine-3'-phosphorothioate
  modified_base 13: mod_base = OTHER; note = 2'-deoxyadenosine-3'-phosphorothioate
  modified_base 14: mod_base = OTHER; note = 2'-deoxythymidine-3'-phosphorothioate
  modified_base 15: mod_base = OTHER; note = 2'-deoxyadenosine-3'-phosphorothioate
  modified_base 16: mod_base = OTHER; note = 2'-O-methylcytidine-3'-phosphorothioate
  modified_base 17: mod_base = OTHER; note = 2'-O-methyladenosine-3'-phosphorothioate
  modified_base 18: mod_base = OTHER; note = 2'-O-methylguanosine-3'-phosphorothioate
  modified_base 19: mod_base = OTHER; note = 2'-O-methylcytidine-3'-phosphorothioate
  modified_base 20: mod_base = OTHER; note = 2'-O-methyluridine-3'-phosphate
  misc_feature 1..5: note = RNA
  misc_feature 6..15: note = DNA
  misc_feature 16..20: note = RNA
gagcatccttggatacagct

SEQ ID NO: 4170 - DNA, 20 bp, synthetic construct
  source 1..20: mol_type = other DNA; note = Description of Artificial Sequence: Synthetic oligonucleotide; note = Description of Combined DNA/RNA Molecule: Synthetic oligonucleotide
  modified_base 1: mod_base = OTHER; note = 2'-O-methylcytidine-3'-phosphorothioate
  modified_base 2: mod_base = OTHER; note = 2'-O-methyladenosine-3'-phosphorothioate
  modified_base 3: mod_base = OTHER; note = 2'-O-methyladenosine-3'-phosphorothioate
  modified_base 4: mod_base = OTHER; note = 2'-O-methylcytidine-3'-phosphorothioate
  modified_base 5: mod_base = OTHER; note = 2'-O-methyladenosine-3'-phosphorothioate
  modified_base 6: mod_base = OTHER; note = 2'-deoxythymidine-3'-phosphorothioate
  modified_base 7: mod_base = OTHER; note = 2'-deoxythymidine-3'-phosphorothioate
  modified_base 8: mod_base = OTHER; note = 5'-methyl-deoxycytidine-3'-phosphorothioate
  modified_base 9: mod_base = OTHER; note = 5'-methyl-deoxycytidine-3'-phosphorothioate
  modified_base 10: mod_base = OTHER; note = 2'-deoxyguanosine-3'-phosphorothioate
  modified_base 11: mod_base = OTHER; note = 2'-deoxyguanosine-3'-phosphorothioate
  modified_base 12: mod_base = OTHER; note = 2'-deoxyadenosine-3'-phosphorothioate
  modified_base 13: mod_base = OTHER; note = 2'-deoxyguanosine-3'-phosphorothioate
  modified_base 14: mod_base = OTHER; note = 5'-methyl-deoxycytidine-3'-phosphorothioate
  modified_base 15: mod_base = OTHER; note = 2'-deoxyadenosine-3'-phosphorothioate
  modified_base 16: mod_base = OTHER; note = 2'-O-methyluridine-3'-phosphorothioate
  modified_base 17: mod_base = OTHER; note = 2'-O-methylcytidine-3'-phosphorothioate
  modified_base 18: mod_base = OTHER; note = 2'-O-methylcytidine-3'-phosphorothioate
  modified_base 19: mod_base = OTHER; note = 2'-O-methyluridine-3'-phosphorothioate
  modified_base 20: mod_base = OTHER; note = 2'-O-methyluridine-3'-phosphate
  misc_feature 1..5: note = RNA
  misc_feature 6..15: note = DNA
  misc_feature 16..20: note = RNA
caacattccggagcatcctt

SEQ ID NO: 4171 - DNA, 20 bp, synthetic construct
  source 1..20: mol_type = other DNA; note = Description of Artificial Sequence: Synthetic oligonucleotide; note = Description of Combined DNA/RNA Molecule: Synthetic oligonucleotide
  modified_base 1: mod_base = OTHER; note = 2'-O-methylguanosine-3'-phosphorothioate
  modified_base 2: mod_base = OTHER; note = 2'-O-methyladenosine-3'-phosphorothioate
  modified_base 3: mod_base = OTHER; note = 2'-O-methyluridine-3'-phosphorothioate
  modified_base 4: mod_base = OTHER; note = 2'-O-methylcytidine-3'-phosphorothioate
  modified_base 5: mod_base = OTHER; note = 2'-O-methyluridine-3'-phosphorothioate
  modified_base 6: mod_base = OTHER; note = 2'-deoxyguanosine-3'-phosphorothioate
  modified_base 7: mod_base = OTHER; note = 2'-deoxythymidine-3'-phosphorothioate
  modified_base 8: mod_base = OTHER; note = 2'-deoxythymidine-3'-phosphorothioate
  modified_base 9: mod_base = OTHER; note = 2'-deoxythymidine-3'-phosphorothioate
  modified_base 10: mod_base = OTHER; note = 5'-methyl-deoxycytidine-3'-phosphorothioate
  modified_base 11: mod_base = OTHER; note = 2'-deoxyadenosine-3'-phosphorothioate
  modified_base 12: mod_base = OTHER; note = 2'-deoxyguanosine-3'-phosphorothioate
  modified_base 13: mod_base = OTHER; note = 5'-methyl-deoxycytidine-3'-phosphorothioate
  modified_base 14: mod_base = OTHER; note = 2'-deoxyadenosine-3'-phosphorothioate
  modified_base 15: mod_base = OTHER; note = 2'-deoxyadenosine-3'-phosphorothioate
  modified_base 16: mod_base = OTHER; note = 2'-O-methylcytidine-3'-phosphorothioate
  modified_base 17: mod_base = OTHER; note = 2'-O-methyladenosine-3'-phosphorothioate
  modified_base 18: mod_base = OTHER; note = 2'-O-methyluridine-3'-phosphorothioate
  modified_base 19: mod_base = OTHER; note = 2'-O-methyluridine-3'-phosphorothioate
  modified_base 20: mod_base = OTHER; note = 2'-O-methylcytidine-3'-phosphate
  misc_feature 1..5: note = RNA
  misc_feature 6..15: note = DNA
  misc_feature 16..20: note = RNA
gatctgtttcagcaacattc

SEQ ID NO: 4172 - DNA, 20 bp, synthetic construct
  source 1..20: mol_type = other DNA; note = Description of Artificial Sequence: Synthetic oligonucleotide; note = Description of Combined DNA/RNA Molecule: Synthetic oligonucleotide
  modified_base 1: mod_base = OTHER; note = 2'-O-methyladenosine-3'-phosphorothioate
  modified_base 2: mod_base = OTHER; note = 2'-O-methylguanosine-3'-phosphorothioate
  modified_base 3: mod_base = OTHER; note = 2'-O-methyladenosine-3'-phosphorothioate
  modified_base 4: mod_base = OTHER; note = 2'-O-methyladenosine-3'-phosphorothioate
  modified_base 5: mod_base = OTHER; note = 2'-O-methylguanosine-3'-phosphorothioate
  modified_base 6: mod_base = OTHER; note = 2'-deoxythymidine-3'-phosphorothioate
  modified_base 7: mod_base = OTHER; note = 5'-methyl-deoxycytidine-3'-phosphorothioate
  modified_base 8: mod_base = OTHER; note = 2'-deoxyguanosine-3'-phosphorothioate
  modified_base 9: mod_base = OTHER; note = 2'-deoxyadenosine-3'-phosphorothioate
  modified_base 10: mod_base = OTHER; note = 5'-methyl-deoxycytidine-3'-phosphorothioate
  modified_base 11: mod_base = OTHER; note = 2'-deoxyadenosine-3'-phosphorothioate
  modified_base 12: mod_base = OTHER; note = 2'-deoxyguanosine-3'-phosphorothioate
  modified_base 13: mod_base = OTHER; note = 2'-deoxyadenosine-3'-phosphorothioate
  modified_base 14: mod_base = OTHER; note = 2'-deoxythymidine-3'-phosphorothioate
  modified_base 15: mod_base = OTHER; note = 5'-methyl-deoxycytidine-3'-phosphorothioate
  modified_base 16: mod_base = OTHER; note = 2'-O-methyluridine-3'-phosphorothioate
  modified_base 17: mod_base = OTHER; note = 2'-O-methylguanosine-3'-phosphorothioate
  modified_base 18: mod_base = OTHER; note = 2'-O-methyluridine-3'-phosphorothioate
  modified_base 19: mod_base = OTHER; note = 2'-O-methyluridine-3'-phosphorothioate
  modified_base 20: mod_base = OTHER; note = 2'-O-methyluridine-3'-phosphate
  misc_feature 1..5: note = RNA
  misc_feature 6..15: note = DNA
  misc_feature 16..20: note = RNA
agaagtcgacagatctgttt

SEQ ID NO: 4173 - DNA, 20 bp, synthetic construct
  source 1..20: mol_type = other DNA; note = Description of Artificial Sequence: Synthetic oligonucleotide; note = Description of Combined DNA/RNA Molecule: Synthetic oligonucleotide
  modified_base 1: mod_base = OTHER; note = 2'-O-methyluridine-3'-phosphorothioate
  modified_base 2: mod_base = OTHER; note = 2'-O-methylguanosine-3'-phosphorothioate
  modified_base 3: mod_base = OTHER; note = 2'-O-methyluridine-3'-phosphorothioate
  modified_base 4: mod_base = OTHER; note = 2'-O-methylcytidine-3'-phosphorothioate
  modified_base 5: mod_base = OTHER; note = 2'-O-methylcytidine-3'-phosphorothioate
  modified_base 6: mod_base = OTHER; note = 2'-deoxythymidine-3'-phosphorothioate
  modified_base 7: mod_base = OTHER; note = 2'-deoxyadenosine-3'-phosphorothioate
  modified_base 8: mod_base = OTHER; note = 2'-deoxyadenosine-3'-phosphorothioate
  modified_base 9: mod_base = OTHER; note = 2'-deoxyadenosine-3'-phosphorothioate
  modified_base 10: mod_base = OTHER; note = 2'-deoxyadenosine-3'-phosphorothioate
  modified_base 11: mod_base = OTHER; note = 5'-methyl-deoxycytidine-3'-phosphorothioate
  modified_base 12: mod_base = OTHER; note = 2'-deoxyadenosine-3'-phosphorothioate
  modified_base 13: mod_base = OTHER; note = 2'-deoxyguanosine-3'-phosphorothioate
  modified_base 14: mod_base = OTHER; note = 2'-deoxyadenosine-3'-phosphorothioate
  modified_base 15: mod_base = OTHER; note = 2'-deoxyadenosine-3'-phosphorothioate
  modified_base 16: mod_base = OTHER; note = 2'-O-methylguanosine-3'-phosphorothioate
  modified_base 17: mod_base = OTHER; note = 2'-O-methyluridine-3'-phosphorothioate
  modified_base 18: mod_base = OTHER; note = 2'-O-methylcytidine-3'-phosphorothioate
  modified_base 19: mod_base = OTHER; note = 2'-O-methylguanosine-3'-phosphorothioate
  modified_base 20: mod_base = OTHER; note = 2'-O-methyladenosine-3'-phosphate
  misc_feature 1..5: note = RNA
  misc_feature 6..15: note = DNA
  misc_feature 16..20: note = RNA
tgtcctaaaacagaagtcga

SEQ ID NO: 4174 - DNA, 20 bp, synthetic construct
  source 1..20: mol_type = other DNA; note = Description of Artificial Sequence: Synthetic oligonucleotide; note = Description of Combined DNA/RNA Molecule: Synthetic oligonucleotide
  modified_base 1: mod_base = OTHER; note = 2'-O-methyluridine-3'-phosphorothioate
  modified_base 2: mod_base = OTHER; note = 2'-O-methylguanosine-3'-phosphorothioate
  modified_base 3: mod_base = OTHER; note = 2'-O-methylcytidine-3'-phosphorothioate
  modified_base 4: mod_base = OTHER; note = 2'-O-methyluridine-3'-phosphorothioate
  modified_base 5: mod_base = OTHER; note = 2'-O-methylguanosine-3'-phosphorothioate
  modified_base 6: mod_base = OTHER; note = 2'-deoxyadenosine-3'-phosphorothioate
  modified_base 7: mod_base = OTHER; note = 5'-methyl-deoxycytidine-3'-phosphorothioate
  modified_base 8: mod_base = OTHER; note = 5'-methyl-deoxycytidine-3'-phosphorothioate
  modified_base 9: mod_base = OTHER; note = 5'-methyl-deoxycytidine-3'-phosphorothioate
  modified_base 10: mod_base = OTHER; note = 2'-deoxythymidine-3'-phosphorothioate
  modified_base 11: mod_base = OTHER; note = 5'-methyl-deoxycytidine-3'-phosphorothioate
  modified_base 12: mod_base = OTHER; note = 2'-deoxythymidine-3'-phosphorothioate
  modified_base 13: mod_base = OTHER; note = 2'-deoxyguanosine-3'-phosphorothioate
  modified_base 14: mod_base = OTHER; note = 2'-deoxythymidine-3'-phosphorothioate
  modified_base 15: mod_base = OTHER; note = 5'-methyl-deoxycytidine-3'-phosphorothioate
  modified_base 16: mod_base = OTHER; note = 2'-O-methylcytidine-3'-phosphorothioate
  modified_base 17: mod_base = OTHER; note = 2'-O-methyluridine-3'-phosphorothioate
  modified_base 18: mod_base = OTHER; note = 2'-O-methyladenosine-3'-phosphorothioate
  modified_base 19: mod_base = OTHER; note = 2'-O-methyladenosine-3'-phosphorothioate
  modified_base 20: mod_base = OTHER; note = 2'-O-methyladenosine-3'-phosphate
  misc_feature 1..5: note = RNA
  misc_feature 6..15: note = DNA
  misc_feature 16..20: note = RNA
tgctgaccctctgtcctaaa

SEQ ID NO: 4175 - DNA, 20 bp, synthetic construct
  source 1..20: mol_type = other DNA; note = Description of Artificial Sequence: Synthetic oligonucleotide; note = Description of Combined DNA/RNA Molecule: Synthetic oligonucleotide
  modified_base 1: mod_base = OTHER; note = 2'-O-methylcytidine-3'-phosphorothioate
  modified_base 2: mod_base = OTHER; note = 2'-O-methyladenosine-3'-phosphorothioate
  modified_base 3: mod_base = OTHER; note = 2'-O-methyluridine-3'-phosphorothioate
  modified_base 4: mod_base = OTHER; note = 2'-O-methyladenosine-3'-phosphorothioate
  modified_base 5: mod_base = OTHER; note = 2'-O-methyluridine-3'-phosphorothioate
  modified_base 6: mod_base = OTHER; note = 2'-deoxythymidine-3'-phosphorothioate
  modified_base 7: mod_base = OTHER; note = 2'-deoxyguanosine-3'-phosphorothioate
  modified_base 8: mod_base = OTHER; note = 2'-deoxyguanosine-3'-phosphorothioate
  modified_base 9: mod_base = OTHER; note = 5'-methyl-deoxycytidine-3'-phosphorothioate
  modified_base 10: mod_base = OTHER; note = 2'-deoxyadenosine-3'-phosphorothioate
  modified_base 11: mod_base = OTHER; note = 2'-deoxythymidine-3'-phosphorothioate
  modified_base 12: mod_base = OTHER; note = 2'-deoxyguanosine-3'-phosphorothioate
  modified_base 13: mod_base = OTHER; note = 5'-methyl-deoxycytidine-3'-phosphorothioate
  modified_base 14: mod_base = OTHER; note = 2'-deoxythymidine-3'-phosphorothioate
  modified_base 15: mod_base = OTHER; note = 2'-deoxyguanosine-3'-phosphorothioate
  modified_base 16: mod_base = OTHER; note = 2'-O-methyladenosine-3'-phosphorothioate
  modified_base 17: mod_base = OTHER; note = 2'-O-methylcytidine-3'-phosphorothioate
  modified_base 18: mod_base = OTHER; note = 2'-O-methylcytidine-3'-phosphorothioate
  modified_base 19: mod_base = OTHER; note = 2'-O-methylcytidine-3'-phosphorothioate
  modified_base 20: mod_base = OTHER; note = 2'-O-methyluridine-3'-phosphate
  misc_feature 1..5: note = RNA
  misc_feature 6..15: note = DNA
  misc_feature 16..20: note = RNA
catattggcatgctgaccct

SEQ ID NO: 4176 - DNA, 20 bp, synthetic construct
  source 1..20: mol_type = other DNA; note = Description of Artificial Sequence: Synthetic oligonucleotide; note = Description of Combined DNA/RNA Molecule: Synthetic oligonucleotide
  modified_base 1: mod_base = OTHER; note = 2'-O-methyladenosine-3'-phosphorothioate
  modified_base 2: mod_base = OTHER; note = 2'-O-methylguanosine-3'-phosphorothioate
  modified_base 3: mod_base = OTHER; note = 2'-O-methylcytidine-3'-phosphorothioate
  modified_base 4: mod_base = OTHER; note = 2'-O-methylcytidine-3'-phosphorothioate
  modified_base 5: mod_base = OTHER; note = 2'-O-methylcytidine-3'-phosphorothioate
  modified_base 6: mod_base = OTHER; note = 5'-methyl-deoxycytidine-3'-phosphorothioate
  modified_base 7: mod_base = OTHER; note = 5'-methyl-deoxycytidine-3'-phosphorothioate
  modified_base 8: mod_base = OTHER; note = 2'-deoxyadenosine-3'-phosphorothioate
  modified_base 9: mod_base = OTHER; note = 5'-methyl-deoxycytidine-3'-phosphorothioate
  modified_base 10: mod_base = OTHER; note = 2'-deoxyadenosine-3'-phosphorothioate
  modified_base 11: mod_base = OTHER; note = 5'-methyl-deoxycytidine-3'-phosphorothioate
  modified_base 12: mod_base = OTHER; note = 2'-deoxyadenosine-3'-phosphorothioate
  modified_base 13: mod_base = OTHER; note = 2'-deoxythymidine-3'-phosphorothioate
  modified_base 14: mod_base = OTHER; note = 2'-deoxyadenosine-3'-phosphorothioate
  modified_base 15: mod_base = OTHER; note = 2'-deoxythymidine-3'-phosphorothioate
  modified_base 16: mod_base = OTHER; note = 2'-O-methyluridine-3'-phosphorothioate
  modified_base 17: mod_base = OTHER; note = 2'-O-methylguanosine-3'-phosphorothioate
  modified_base 18: mod_base = OTHER; note = 2'-O-methylguanosine-3'-phosphorothioate
  modified_base 19: mod_base = OTHER; note = 2'-O-methylcytidine-3'-phosphorothioate
  modified_base 20: mod_base = OTHER; note = 2'-O-methyladenosine-3'-phosphate
  misc_feature 1..5: note = RNA
  misc_feature 6..15: note = DNA
  misc_feature 16..20: note = RNA
agcccccacacatattggca

SEQ ID NO: 4177 - DNA, 20 bp, synthetic construct
  source 1..20: mol_type = other DNA; note = Description of Artificial Sequence: Synthetic oligonucleotide; note = Description of Combined DNA/RNA Molecule: Synthetic oligonucleotide
  modified_base 1: mod_base = OTHER; note = 2'-O-methylcytidine-3'-phosphorothioate
  modified_base 2: mod_base = OTHER; note = 2'-O-methyluridine-3'-phosphorothioate
  modified_base 3: mod_base = OTHER; note = 2'-O-methylguanosine-3'-phosphorothioate
  modified_base 4: mod_base = OTHER; note = 2'-O-methylcytidine-3'-phosphorothioate
  modified_base 5: mod_base = OTHER; note = 2'-O-methyladenosine-3'-phosphorothioate
  modified_base 6: mod_base = OTHER; note = 2'-deoxythymidine-3'-phosphorothioate
  modified_base 7: mod_base = OTHER; note = 2'-deoxyguanosine-3'-phosphorothioate
  modified_base 8: mod_base = OTHER; note = 2'-deoxyguanosine-3'-phosphorothioate
  modified_base 9: mod_base = OTHER; note = 5'-methyl-deoxycytidine-3'-phosphorothioate
  modified_base 10: mod_base = OTHER; note = 5'-methyl-deoxycytidine-3'-phosphorothioate
  modified_base 11: mod_base = OTHER; note = 2'-deoxyguanosine-3'-phosphorothioate
  modified_base 12: mod_base = OTHER; note = 2'-deoxythymidine-3'-phosphorothioate
  modified_base 13: mod_base = OTHER; note = 2'-deoxyadenosine-3'-phosphorothioate
  modified_base 14: mod_base = OTHER; note = 2'-deoxyguanosine-3'-phosphorothioate
  modified_base 15: mod_base = OTHER; note = 5'-methyl-deoxycytidine-3'-phosphorothioate
  modified_base 16: mod_base = OTHER; note = 2'-O-methylcytidine-3'-phosphorothioate
  modified_base 17: mod_base = OTHER; note = 2'-O-methylcytidine-3'-phosphorothioate
  modified_base 18: mod_base = OTHER; note = 2'-O-methylcytidine-3'-phosphorothioate
  modified_base 19: mod_base = OTHER; note = 2'-O-methylcytidine-3'-phosphorothioate
  modified_base 20: mod_base = OTHER; note = 2'-O-methyladenosine-3'-phosphate
  misc_feature 1..5: note = RNA
  misc_feature 6..15: note = DNA
  misc_feature 16..20: note = RNA
ctgcatggccgtagccccca

SEQ ID NO: 4178 - DNA, 20 bp, synthetic construct
  source 1..20: mol_type = other DNA; note = Description of Artificial Sequence: Synthetic oligonucleotide; note = Description of Combined DNA/RNA Molecule: Synthetic oligonucleotide
  modified_base 1: mod_base = OTHER; note = 2'-O-methylguanosine-3'-phosphorothioate
  modified_base 2: mod_base = OTHER; note = 2'-O-methyladenosine-3'-phosphorothioate
  modified_base 3: mod_base = OTHER; note = 2'-O-methylguanosine-3'-phosphorothioate
  modified_base 4: mod_base = OTHER; note = 2'-O-methylcytidine-3'-phosphorothioate
  modified_base 5: mod_base = OTHER; note = 2'-O-methylcytidine-3'-phosphorothioate
  modified_base 6: mod_base = OTHER; note = 2'-deoxyadenosine-3'-phosphorothioate
  modified_base 7: mod_base = OTHER; note = 2'-deoxythymidine-3'-phosphorothioate
  modified_base 8: mod_base = OTHER; note = 2'-deoxyguanosine-3'-phosphorothioate
  modified_base 9: mod_base = OTHER; note = 5'-methyl-deoxycytidine-3'-phosphorothioate
  modified_base 10: mod_base = OTHER; note = 2'-deoxyguanosine-3'-phosphorothioate
  modified_base 11: mod_base = OTHER; note = 5'-methyl-deoxycytidine-3'-phosphorothioate
  modified_base 12: mod_base = OTHER; note = 2'-deoxythymidine-3'-phosphorothioate
  modified_base 13: mod_base = OTHER; note = 2'-deoxyguanosine-3'-phosphorothioate
  modified_base 14: mod_base = OTHER; note = 5'-methyl-deoxycytidine-3'-phosphorothioate
  modified_base 15: mod_base = OTHER; note = 2'-deoxyadenosine-3'-phosphorothioate
  modified_base 16: mod_base = OTHER; note = 2'-O-methyluridine-3'-phosphorothioate
  modified_base 17: mod_base = OTHER; note = 2'-O-methylguanosine-3'-phosphorothioate
  modified_base 18: mod_base = OTHER; note = 2'-O-methylguanosine-3'-phosphorothioate
  modified_base 19: mod_base = OTHER; note = 2'-O-methylcytidine-3'-phosphorothioate
  modified_base 20: mod_base = OTHER; note = 2'-O-methylcytidine-3'-phosphate
  misc_feature 1..5: note = RNA
  misc_feature 6..15: note = DNA
  misc_feature 16..20: note = RNA
gagccatgcgctgcatggcc

SEQ ID NO: 4179 - DNA, 20 bp, synthetic construct
  source 1..20: mol_type = other DNA; note = Description of Artificial Sequence: Synthetic oligonucleotide; note = Description of Combined DNA/RNA Molecule: Synthetic oligonucleotide
  modified_base 1: mod_base = OTHER; note = 2'-O-methylguanosine-3'-phosphorothioate
  modified_base 2: mod_base = OTHER; note = 2'-O-methylcytidine-3'-phosphorothioate
  modified_base 3: mod_base = OTHER; note = 2'-O-methylcytidine-3'-phosphorothioate
  modified_base 4: mod_base = OTHER; note = 2'-O-methylguanosine-3'-phosphorothioate
  modified_base 5: mod_base = OTHER; note = 2'-O-methyluridine-3'-phosphorothioate
  modified_base 6: mod_base = OTHER; note = 5'-methyl-deoxycytidine-3'-phosphorothioate
  modified_base 7: mod_base = OTHER; note = 5'-methyl-deoxycytidine-3'-phosphorothioate
  modified_base 8: mod_base = OTHER; note = 2'-deoxyadenosine-3'-phosphorothioate
  modified_base 9: mod_base = OTHER; note = 5'-methyl-deoxycytidine-3'-phosphorothioate
  modified_base 10: mod_base = OTHER; note = 2'-deoxyadenosine-3'-phosphorothioate
  modified_base 11: mod_base = OTHER; note = 2'-deoxythymidine-3'-phosphorothioate
  modified_base 12: mod_base = OTHER; note = 2'-deoxyguanosine-3'-phosphorothioate
  modified_base 13: mod_base = OTHER; note = 2'-deoxyadenosine-3'-phosphorothioate
  modified_base 14: mod_base = OTHER; note = 2'-deoxyguanosine-3'-phosphorothioate
  modified_base 15: mod_base = OTHER; note = 5'-methyl-deoxycytidine-3'-phosphorothioate
  modified_base 16: mod_base = OTHER; note = 2'-O-methylcytidine-3'-phosphorothioate
  modified_base 17: mod_base = OTHER; note = 2'-O-methyladenosine-3'-phosphorothioate
  modified_base 18: mod_base = OTHER; note = 2'-O-methyluridine-3'-phosphorothioate
  modified_base 19: mod_base = OTHER; note = 2'-O-methylguanosine-3'-phosphorothioate
  modified_base 20: mod_base = OTHER; note = 2'-O-methylcytidine-3'-phosphate
  misc_feature 1..5: note = RNA
  misc_feature 6..15: note = DNA
  misc_feature 16..20: note = RNA
gccgtccacatgagccatgc

SEQ ID NO: 4180 - DNA, 20 bp, synthetic construct
  source 1..20: mol_type = other DNA; note = Description of Artificial Sequence: Synthetic oligonucleotide; note = Description of Combined DNA/RNA Molecule: Synthetic oligonucleotide
  modified_base 1: mod_base = OTHER; note = 2'-O-methyladenosine-3'-phosphorothioate
  modified_base 2: mod_base = OTHER; note = 2'-O-methylguanosine-3'-phosphorothioate
  modified_base 3: mod_base = OTHER; note = 2'-O-methyluridine-3'-phosphorothioate
  modified_base 4: mod_base = OTHER; note = 2'-O-methylguanosine-3'-phosphorothioate
  modified_base 5: mod_base = OTHER; note = 2'-O-methylguanosine-3'-phosphorothioate
  modified_base 6: mod_base = OTHER; note = 5'-methyl-deoxycytidine-3'-phosphorothioate
  modified_base 7: mod_base = OTHER; note = 2'-deoxyadenosine-3'-phosphorothioate
  modified_base 8: mod_base = OTHER; note = 2'-deoxyadenosine-3'-phosphorothioate
  modified_base 9: mod_base = OTHER; note = 2'-deoxyguanosine-3'-phosphorothioate
  modified_base 10: mod_base = OTHER; note = 5'-methyl-deoxycytidine-3'-phosphorothioate
  modified_base 11: mod_base = OTHER; note = 2'-deoxythymidine-3'-phosphorothioate
  modified_base 12: mod_base = OTHER; note = 5'-methyl-deoxycytidine-3'-phosphorothioate
  modified_base 13: mod_base = OTHER; note = 2'-deoxyguanosine-3'-phosphorothioate
  modified_base 14: mod_base = OTHER; note = 5'-methyl-deoxycytidine-3'-phosphorothioate
  modified_base 15: mod_base = OTHER; note = 5'-methyl-deoxycytidine-3'-phosphorothioate
  modified_base 16: mod_base = OTHER; note = 2'-O-methylguanosine-3'-phosphorothioate
  modified_base 17: mod_base = OTHER; note = 2'-O-methyluridine-3'-phosphorothioate
  modified_base 18: mod_base = OTHER; note = 2'-O-methylcytidine-3'-phosphorothioate
  modified_base 19: mod_base = OTHER; note = 2'-O-methylcytidine-3'-phosphorothioate
  modified_base 20: mod_base = OTHER; note = 2'-O-methyladenosine-3'-phosphate
  misc_feature 1..5: note = RNA
  misc_feature 6..15: note = DNA
  misc_feature 16..20: note = RNA
agtggcaagctcgccgtcca

SEQ ID NO: 4181 - DNA, 20 bp, synthetic construct
  source 1..20: mol_type = other DNA; note = Description of Artificial Sequence: Synthetic oligonucleotide
  modified_base 1: mod_base = OTHER; note = 2'-O-methyladenosine-3'-phosphorothioate
  modified_base 2: mod_base = OTHER; note = 2'-O-methylcytidine-3'-phosphorothioate
  modified_base 3: mod_base = OTHER; note = 2'-O-methyladenosine-3'-phosphorothioate
  modified_base 4: mod_base = OTHER; note = 2'-O-methylguanosine-3'-phosphorothioate
  modified_base 5: mod_base = OTHER; note = 2'-O-methylguanosine-3'-phosphorothioate
  modified_base 6: mod_base = OTHER; note = 5'-methyl-deoxycytidine-3'-phosphorothioate
  modified_base 7: mod_base = OTHER; note = 2'-deoxythymidine-3'-phosphorothioate
  modified_base 8: mod_base = OTHER; note = 5'-methyl-deoxycytidine-3'-phosphorothioate
  modified_base 9: mod_base = OTHER; note = 2'-deoxythymidine-3'-phosphorothioate
  modified_base 10: mod_base = OTHER; note = 5'-methyl-deoxycytidine-3'-phosphorothioate
  modified_base 11: mod_base = OTHER; note = 2'-deoxyadenosine-3'-phosphorothioate
  modified_base 12: mod_base = OTHER; note = 5'-methyl-deoxycytidine-3'-phosphorothioate
  modified_base 13: mod_base = OTHER; note = 2'-deoxyadenosine-3'-phosphorothioate
  modified_base 14: mod_base = OTHER; note = 2'-deoxyguanosine-3'-phosphorothioate
  modified_base 15: mod_base = OTHER; note = 2'-deoxythymidine-3'-phosphorothioate
  modified_base 16: mod_base = OTHER; note = 2'-O-methylguanosine-3'-phosphorothioate
  modified_base 17: mod_base = OTHER; note = 2'-O-methylguanosine-3'-phosphorothioate
  modified_base 18: mod_base = OTHER; note = 2'-O-methylcytidine-3'-phosphorothioate
  modified_base 19: mod_base = OTHER; note = 2'-O-methyladenosine-3'-phosphorothioate
  modified_base 20: mod_base = OTHER; note = 2'-O-methyladenosine-3'-phosphate
  misc_feature 1..5: note = RNA
  misc_feature 6..15: note = DNA
  misc_feature 16..20: note = RNA
acaggctctcacagtggcaa

SEQ ID NO: 4182 - DNA, 20 bp, synthetic construct
  source 1..20: mol_type = other DNA; note = Description of Artificial Sequence: Synthetic oligonucleotide; note = Description of Combined DNA/RNA Molecule: Synthetic oligonucleotide
  modified_base 1: mod_base = OTHER; note = 2'-O-methylcytidine-3'-phosphorothioate
  modified_base 2: mod_base = OTHER; note = 2'-O-methyladenosine-3'-phosphorothioate
  modified_base 3: mod_base = OTHER; note = 2'-O-methylguanosine-3'-phosphorothioate
  modified_base 4: mod_base = OTHER; note = 2'-O-methylguanosine-3'-phosphorothioate
  modified_base 5: mod_base = OTHER; note = 2'-O-methylguanosine-3'-phosphorothioate
  modified_base 6: mod_base = OTHER; note = 2'-deoxyadenosine-3'-phosphorothioate
  modified_base 7: mod_base = OTHER; note = 5'-methyl-deoxycytidine-3'-phosphorothioate
  modified_base 8: mod_base = OTHER; note = 2'-deoxythymidine-3'-phosphorothioate
  modified_base 9: mod_base = OTHER; note = 2'-deoxyguanosine-3'-phosphorothioate
  modified_base 10: mod_base = OTHER; note = 2'-deoxyadenosine-3'-phosphorothioate
  modified_base 11: mod_base = OTHER; note = 5'-methyl-deoxycytidine-3'-phosphorothioate
  modified_base 12: mod_base = OTHER; note = 2'-deoxyadenosine-3'-phosphorothioate
  modified_base 13: mod_base = OTHER; note = 2'-deoxyguanosine-3'-phosphorothioate
  modified_base 14: mod_base = OTHER; note = 2'-deoxyguanosine-3'-phosphorothioate
  modified_base 15: mod_base = OTHER; note = 5'-methyl-deoxycytidine-3'-phosphorothioate
  modified_base 16: mod_base = OTHER; note = 2'-O-methyluridine-3'-phosphorothioate
  modified_base 17: mod_base = OTHER; note = 2'-O-methylcytidine-3'-phosphorothioate
  modified_base 18: mod_base = OTHER; note = 2'-O-methyluridine-3'-phosphorothioate
  modified_base 19: mod_base = OTHER; note = 2'-O-methylcytidine-3'-phosphorothioate
  modified_base 20: mod_base = OTHER; note = 2'-O-methyladenosine-3'-phosphate
  misc_feature 1..5: note = RNA
  misc_feature 6..15: note = DNA
  misc_feature 16..20: note = RNA
cagggactgacaggctctca

SEQ ID NO: 4183 - DNA, 20 bp, synthetic construct
  source 1..20: mol_type = other DNA; note = Description of Artificial Sequence: Synthetic oligonucleotide; note = Description of Combined DNA/RNA Molecule: Synthetic oligonucleotide
  modified_base 1: mod_base = OTHER; note = 2'-O-methyladenosine-3'-phosphorothioate
  modified_base 2: mod_base = OTHER; note = 2'-O-methyluridine-3'-phosphorothioate
  modified_base 3: mod_base = OTHER; note = 2'-O-methylguanosine-3'-phosphorothioate
  modified_base 4: mod_base = OTHER; note = 2'-O-methylcytidine-3'-phosphorothioate
  modified_base 5: mod_base = OTHER; note = 2'-O-methylcytidine-3'-phosphorothioate
  modified_base 6: mod_base = OTHER; note = 5'-methyl-deoxycytidine-3'-phosphorothioate
  modified_base 7: mod_base = OTHER; note = 2'-deoxyguanosine-3'-phosphorothioate
  modified_base 8: mod_base = OTHER; note = 2'-deoxythymidine-3'-phosphorothioate
  modified_base 9: mod_base = OTHER; note = 2'-deoxythymidine-3'-phosphorothioate
  modified_base 10: mod_base = OTHER; note = 5'-methyl-deoxycytidine-3'-phosphorothioate
  modified_base 11: mod_base = OTHER; note = 5'-methyl-deoxycytidine-3'-phosphorothioate
  modified_base 12: mod_base = OTHER; note = 5'-methyl-deoxycytidine-3'-phosphorothioate
  modified_base 13: mod_base = OTHER; note = 2'-deoxyadenosine-3'-phosphorothioate
  modified_base 14: mod_base = OTHER; note = 2'-deoxyguanosine-3'-phosphorothioate
  modified_base 15: mod_base = OTHER; note = 2'-deoxyguanosine-3'-phosphorothioate
  modified_base 16: mod_base = OTHER; note = 2'-O-methylguanosine-3'-phosphorothioate
  modified_base 17: mod_base = OTHER; note = 2'-O-methyladenosine-3'-phosphorothioate
  modified_base 18: mod_base = OTHER; note = 2'-O-methylcytidine-3'-phosphorothioate
  modified_base 19: mod_base = OTHER; note = 2'-O-methyluridine-3'-phosphorothioate
  modified_base 20: mod_base = OTHER; note = 2'-O-methylguanosine-3'-phosphate
  misc_feature 1..5: note = RNA
  misc_feature 6..15: note = DNA
  misc_feature 16..20: note = RNA
atgcccgttcccagggactg

SEQ ID NO: 4184 - DNA, 20 bp, synthetic construct
  source 1..20: mol_type = other DNA; note = Description of Artificial Sequence: Synthetic oligonucleotide; note = Description of Combined DNA/RNA Molecule: Synthetic oligonucleotide
  modified_base 1: mod_base = OTHER; note = 2'-O-methylguanosine-3'-phosphorothioate
  modified_base 2: mod_base = OTHER; note = 2'-O-methyladenosine-3'-phosphorothioate
  modified_base 3: mod_base = OTHER; note = 2'-O-methyladenosine-3'-phosphorothioate
  modified_base 4: mod_base = OTHER; note = 2'-O-methylcytidine-3'-phosphorothioate
  modified_base 5: mod_base = OTHER; note = 2'-O-methyluridine-3'-phosphorothioate
  modified_base 6: mod_base = OTHER; note = 5'-methyl-deoxycytidine-3'-phosphorothioate
  modified_base 7: mod_base = OTHER; note = 2'-deoxyadenosine-3'-phosphorothioate
  modified_base 8: mod_base = OTHER; note = 2'-deoxyadenosine-3'-phosphorothioate
  modified_base 9: mod_base = OTHER; note = 5'-methyl-deoxycytidine-3'-phosphorothioate
  modified_base 10: mod_base = OTHER; note = 2'-deoxyadenosine-3'-phosphorothioate
  modified_base 11: mod_base = OTHER; note = 2'-deoxythymidine-3'-phosphorothioate
  modified_base 12: mod_base = OTHER; note = 5'-methyl-deoxycytidine-3'-phosphorothioate
  modified_base 13: mod_base = OTHER; note = 2'-deoxyadenosine-3'-phosphorothioate
  modified_base 14: mod_base = OTHER; note = 2'-deoxythymidine-3'-phosphorothioate
  modified_base 15: mod_base = OTHER; note = 2'-deoxyguanosine-3'-phosphorothioate
  modified_base 16: mod_base = OTHER; note = 2'-O-methylcytidine-3'-phosphorothioate
  modified_base 17: mod_base = OTHER; note = 2'-O-methylcytidine-3'-phosphorothioate
  modified_base 18: mod_base = OTHER; note = 2'-O-methylcytidine-3'-phosphorothioate
  modified_base 19: mod_base = OTHER; note = 2'-O-methylguanosine-3'-phosphorothioate
  modified_base 20: mod_base = OTHER; note = 2'-O-methyluridine-3'-phosphate
  misc_feature 1..5: note = RNA
  misc_feature 6..15: note = DNA
  misc_feature 16..20: note = RNA
gaactcaacatcatgcccgt

SEQ ID NO: 4185 - DNA, 20 bp, synthetic construct
  source 1..20: mol_type = other DNA; note = Description of Artificial Sequence: Synthetic oligonucleotide; note = Description of Combined DNA/RNA Molecule: Synthetic oligonucleotide
  modified_base 1: mod_base = OTHER; note = 2'-O-methylguanosine-3'-phosphorothioate
  modified_base 2: mod_base = OTHER; note = 2'-O-methyladenosine-3'-phosphorothioate
  modified_base 3: mod_base = OTHER; note = 2'-O-methylguanosine-3'-phosphorothioate
  modified_base 4: mod_base = OTHER; note = 2'-O-methylguanosine-3'-phosphorothioate
  modified_base 5: mod_base = OTHER; note = 2'-O-methyluridine-3'-phosphorothioate
  modified_base 6: mod_base = OTHER; note = 2'-deoxyguanosine-3'-phosphorothioate
  modified_base 7: mod_base = OTHER; note = 2'-deoxyguanosine-3'-phosphorothioate
  modified_base 8: mod_base = OTHER; note = 5'-methyl-deoxycytidine-3'-phosphorothioate
  modified_base 9: mod_base = OTHER; note = 5'-methyl-deoxycytidine-3'-phosphorothioate
  modified_base 10: mod_base = OTHER; note = 5'-methyl-deoxycytidine-3'-phosphorothioate
  modified_base 11: mod_base = OTHER; note = 2'-deoxyadenosine-3'-phosphorothioate
  modified_base 12: mod_base = OTHER; note = 2'-deoxyguanosine-3'-phosphorothioate
  modified_base 13: mod_base = OTHER; note = 2'-deoxyguanosine-3'-phosphorothioate
  modified_base 14: mod_base = OTHER; note = 2'-deoxyadenosine-3'-phosphorothioate
  modified_base 15: mod_base = OTHER; note = 2'-deoxyadenosine-3'-phosphorothioate
  modified_base 16: mod_base = OTHER; note = 2'-O-methylcytidine-3'-phosphorothioate
  modified_base 17: mod_base = OTHER; note = 2'-O-methyluridine-3'-phosphorothioate
  modified_base 18: mod_base = OTHER; note = 2'-O-methylcytidine-3'-phosphorothioate
  modified_base 19: mod_base = OTHER; note = 2'-O-methyladenosine-3'-phosphorothioate
  modified_base 20: mod_base = OTHER; note = 2'-O-methyladenosine-3'-phosphate
  misc_feature 1..5: note = RNA
  misc_feature 6..15: note = DNA
  misc_feature 16..20: note = RNA
gaggtggcccaggaactcaa

SEQ ID NO: 4186 - DNA, 20 bp, synthetic construct
  source 1..20: mol_type = other DNA; note = Description of Artificial Sequence: Synthetic oligonucleotide; note = Description of Combined DNA/RNA Molecule: Synthetic oligonucleotide
  modified_base 1: mod_base = OTHER; note = 2'-O-methyluridine-3'-phosphorothioate
  modified_base 2: mod_base = OTHER; note = 2'-O-methylcytidine-3'-phosphorothioate
  modified_base 3: mod_base = OTHER; note = 2'-O-methyladenosine-3'-phosphorothioate
  modified_base 4: mod_base = OTHER; note = 2'-O-methyladenosine-3'-phosphorothioate
  modified_base 5: mod_base = OTHER; note = 2'-O-methyluridine-3'-phosphorothioate
  modified_base 6: mod_base = OTHER; note = 2'-deoxythymidine-3'-phosphorothioate
  modified_base 7: mod_base = OTHER; note = 2'-deoxyguanosine-3'-phosphorothioate
  modified_base 8: mod_base = OTHER; note = 2'-deoxyadenosine-3'-phosphorothioate
  modified_base 9: mod_base = OTHER; note = 2'-deoxyguanosine-3'-phosphorothioate
  modified_base 10: mod_base = OTHER; note = 2'-deoxyguanosine-3'-phosphorothioate
  modified_base 11: mod_base = OTHER; note = 2'-deoxyadenosine-3'-phosphorothioate
  modified_base 12: mod_base = OTHER; note = 2'-deoxyguanosine-3'-phosphorothioate
  modified_base 13: mod_base = OTHER; note = 2'-deoxyguanosine-3'-phosphorothioate
  modified_base 14: mod_base = OTHER; note = 2'-deoxythymidine-3'-phosphorothioate
  modified_base 15: mod_base = OTHER; note = 2'-deoxyguanosine-3'-phosphorothioate
  modified_base 16: mod_base = OTHER; note = 2'-O-methylguanosine-3'-phosphorothioate
  modified_base 17: mod_base = OTHER; note = 2'-O-methylcytidine-3'-phosphorothioate
  modified_base 18: mod_base = OTHER; note = 2'-O-methylcytidine-3'-phosphorothioate
  modified_base 19: mod_base = OTHER; note = 2'-O-methylcytidine-3'-phosphorothioate
  modified_base 20: mod_base = OTHER; note = 2'-O-methyladenosine-3'-phosphate
  misc_feature 1..5: note = RNA
  misc_feature 6..15: note = DNA
  misc_feature 16..20: note = RNA
tcaattgaggaggtggccca

SEQ ID NO: 4187 - DNA, 20 bp, synthetic construct
  source 1..20: mol_type = other DNA; note = Description of Artificial Sequence: Synthetic oligonucleotide; note = Description of Combined DNA/RNA Molecule: Synthetic oligonucleotide
  modified_base 1: mod_base = OTHER; note = 2'-O-methylcytidine-3'-phosphorothioate
  modified_base 2: mod_base = OTHER; note = 2'-O-methylcytidine-3'-phosphorothioate
  modified_base 3: mod_base = OTHER; note = 2'-O-methylguanosine-3'-phosphorothioate
  modified_base 4: mod_base = OTHER; note = 2'-O-methylcytidine-3'-phosphorothioate
  modified_base 5: mod_base = OTHER; note = 2'-O-methylcytidine-3'-phosphorothioate
  modified_base 6: mod_base = OTHER; note = 2'-deoxyadenosine-3'-phosphorothioate
  modified_base 7: mod_base = OTHER; note = 5'-methyl-deoxycytidine-3'-phosphorothioate
  modified_base 8: mod_base = OTHER; note = 2'-deoxythymidine-3'-phosphorothioate
  modified_base 9: mod_base = OTHER; note = 2'-deoxythymidine-3'-phosphorothioate
  modified_base 10: mod_base = OTHER; note = 5'-methyl-deoxycytidine-3'-phosphorothioate
  modified_base 11: mod_base = OTHER; note = 2'-deoxythymidine-3'-phosphorothioate
  modified_base 12: mod_base = OTHER; note = 2'-deoxythymidine-3'-phosphorothioate
  modified_base 13: mod_base = OTHER; note = 5'-methyl-deoxycytidine-3'-phosphorothioate
  modified_base 14: mod_base = OTHER; note = 2'-deoxyadenosine-3'-phosphorothioate
  modified_base 15: mod_base = OTHER; note = 2'-deoxyadenosine-3'-phosphorothioate
  modified_base 16: mod_base = OTHER; note = 2'-O-methyluridine-3'-phosphorothioate
  modified_base 17: mod_base = OTHER; note = 2'-O-methyluridine-3'-phosphorothioate
  modified_base 18: mod_base = OTHER; note = 2'-O-methylguanosine-3'-phosphorothioate
  modified_base 19: mod_base = OTHER; note = 2'-O-methyladenosine-3'-phosphorothioate
  modified_base 20: mod_base = OTHER; note = 2'-O-methylguanosine-3'-phosphate
  misc_feature 1..5: note = RNA
  misc_feature 6..15: note = DNA
  misc_feature 16..20: note = RNA
ccgccacttcttcaattgag

SEQ ID NO: 4188 - DNA, 20 bp, synthetic construct
  source 1..20: mol_type = other DNA; note = Description of Artificial Sequence: Synthetic oligonucleotide; note = Description of Combined DNA/RNA Molecule: Synthetic oligonucleotide
  modified_base 1: mod_base = OTHER; note = 2'-O-methylcytidine-3'-phosphorothioate
  modified_base 2: mod_base = OTHER; note = 2'-O-methyladenosine-3'-phosphorothioate
  modified_base 3: mod_base = OTHER; note = 2'-O-methylguanosine-3'-phosphorothioate
  modified_base 4: mod_base = OTHER; note = 2'-O-methylguanosine-3'-phosphorothioate
  modified_base 5: mod_base = OTHER; note = 2'-O-methyladenosine-3'-phosphorothioate
  modified_base 6: mod_base = OTHER; note = 5'-methyl-deoxycytidine-3'-phosphorothioate
  modified_base 7: mod_base = OTHER; note = 5'-methyl-deoxycytidine-3'-phosphorothioate
  modified_base 8: mod_base = OTHER; note = 2'-deoxyadenosine-3'-phosphorothioate
  modified_base 9: mod_base = OTHER; note = 2'-deoxyguanosine-3'-phosphorothioate
  modified_base 10: mod_base = OTHER; note = 5'-methyl-deoxycytidine-3'-phosphorothioate
  modified_base 11: mod_base = OTHER; note = 2'-deoxythymidine-3'-phosphorothioate
  modified_base 12: mod_base = OTHER; note = 2'-deoxythymidine-3'-phosphorothioate
  modified_base 13: mod_base = OTHER; note = 5'-methyl-deoxycytidine-3'-phosphorothioate
  modified_base 14: mod_base = OTHER; note = 5'-methyl-deoxycytidine-3'-phosphorothioate
  modified_base 15: mod_base = OTHER; note = 2'-deoxyguanosine-3'-phosphorothioate
  modified_base 16: mod_base = OTHER; note = 2'-O-methylcytidine-3'-phosphorothioate
  modified_base 17: mod_base = OTHER; note = 2'-O-methylcytidine-3'-phosphorothioate
  modified_base 18: mod_base = OTHER; note = 2'-O-methyladenosine-3'-phosphorothioate
  modified_base 19: mod_base = OTHER; note = 2'-O-methylcytidine-3'-phosphorothioate
  modified_base 20: mod_base = OTHER; note = 2'-O-methyluridine-3'-phosphate
  misc_feature 1..5: note = RNA
  misc_feature 6..15: note = DNA
  misc_feature 16..20: note = RNA
caggaccagcttccgccact

SEQ ID NO: 4189 - DNA, 20 bp, synthetic construct
  source 1..20: mol_type = other DNA; note = Description of Artificial Sequence: Synthetic oligonucleotide
  modified_base 1: mod_base = OTHER; note = 2'-O-methyladenosine-3'-phosphorothioate
  modified_base 2: mod_base = OTHER; note = 2'-O-methylcytidine-3'-phosphorothioate
  modified_base 3: mod_base = OTHER; note = 2'-O-methylguanosine-3'-phosphorothioate
  modified_base 4: mod_base = OTHER; note = 2'-O-methyladenosine-3'-phosphorothioate
  modified_base 5: mod_base = OTHER; note = 2'-O-methyladenosine-3'-phosphorothioate
  modified_base 6: mod_base = OTHER; note = 2'-deoxyguanosine-3'-phosphorothioate
  modified_base 7: mod_base = OTHER; note = 2'-deoxythymidine-3'-phosphorothioate
  modified_base 8: mod_base = OTHER; note = 2'-deoxyguanosine-3'-phosphorothioate
  modified_base 9: mod_base = OTHER; note = 5'-methyl-deoxycytidine-3'-phosphorothioate
  modified_base 10: mod_base = OTHER; note = 5'-methyl-deoxycytidine-3'-phosphorothioate
  modified_base 11: mod_base = OTHER; note = 2'-deoxythymidine-3'-phosphorothioate
  modified_base 12: mod_base = OTHER; note = 5'-methyl-deoxycytidine-3'-phosphorothioate
  modified_base 13: mod_base = OTHER; note = 2'-deoxyadenosine-3'-phosphorothioate
  modified_base 14: mod_base = OTHER; note = 2'-deoxyguanosine-3'-phosphorothioate
  modified_base 15: mod_base = OTHER; note = 2'-deoxyguanosine-3'-phosphorothioate
  modified_base 16: mod_base = OTHER; note = 2'-O-methyladenosine-3'-phosphorothioate
  modified_base 17: mod_base = OTHER; note = 2'-O-methylcytidine-3'-phosphorothioate
  modified_base 18: mod_base = OTHER; note = 2'-O-methylcytidine-3'-phosphorothioate
  modified_base 19: mod_base = OTHER; note = 2'-O-methyladenosine-3'-phosphorothioate
  modified_base 20: mod_base = OTHER; note = 2'-O-methylguanosine-3'-phosphate
  misc_feature 1..5: note = RNA
  misc_feature 6..15: note = DNA
  misc_feature 16..20: note = RNA
acgaagtgcctcaggaccag

SEQ ID NO: 4190 - DNA, 20 bp, synthetic construct
  source 1..20: mol_type = other DNA; note = Description of Artificial Sequence: Synthetic oligonucleotide; note = Description of Combined DNA/RNA Molecule: Synthetic oligonucleotide
  modified_base 1: mod_base = OTHER; note = 2'-O-methylcytidine-3'-phosphorothioate
  modified_base 2: mod_base = OTHER; note = 2'-O-methyladenosine-3'-phosphorothioate
  modified_base 3: mod_base = OTHER; note = 2'-O-methylguanosine-3'-phosphorothioate
  modified_base 4: mod_base = OTHER; note = 2'-O-methyluridine-3'-phosphorothioate
  modified_base 5: mod_base = OTHER; note = 2'-O-methyluridine-3'-phosphorothioate
  modified_base 6: mod_base = OTHER; note = 2'-deoxyguanosine-3'-phosphorothioate
  modified_base 7: mod_base = OTHER; note = 5'-methyl-deoxycytidine-3'-phosphorothioate
  modified_base 8: mod_base = OTHER; note = 2'-deoxyadenosine-3'-phosphorothioate
  modified_base 9: mod_base = OTHER; note = 2'-deoxyguanosine-3'-phosphorothioate
  modified_base 10: mod_base = OTHER; note = 5'-methyl-deoxycytidine-3'-phosphorothioate
  modified_base 11: mod_base = OTHER; note = 5'-methyl-deoxycytidine-3'-phosphorothioate
  modified_base 12: mod_base = OTHER; note = 2'-deoxyadenosine-3'-phosphorothioate
  modified_base 13: mod_base = OTHER; note = 2'-deoxyadenosine-3'-phosphorothioate
  modified_base 14: mod_base = OTHER; note = 5'-methyl-deoxycytidine-3'-phosphorothioate
  modified_base 15: mod_base = OTHER; note = 2'-deoxyguanosine-3'-phosphorothioate
  modified_base 16: mod_base = OTHER; note = 2'-O-methyladenosine-3'-phosphorothioate
  modified_base 17: mod_base = OTHER; note = 2'-O-methyladenosine-3'-phosphorothioate
  modified_base 18: mod_base = OTHER; note = 2'-O-methylguanosine-3'-phosphorothioate
  modified_base 19: mod_base = OTHER; note = 2'-O-methyluridine-3'-phosphorothioate
  modified_base 20: mod_base = OTHER; note = 2'-O-methylguanosine-3'-phosphate
  misc_feature 1..5: note = RNA
  misc_feature 6..15: note = DNA
  misc_feature 16..20: note = RNA
cagttgcagccaacgaagtg

SEQ ID NO: 4191 - DNA, 20 bp, synthetic construct
  source 1..20: mol_type = other DNA; note = Description of Artificial Sequence: Synthetic oligonucleotide; note = Description of Combined DNA/RNA Molecule: Synthetic oligonucleotide
  modified_base 1: mod_base = OTHER; note = 2'-O-methyluridine-3'-phosphorothioate
  modified_base 2: mod_base = OTHER; note = 2'-O-methylguanosine-3'-phosphorothioate
  modified_base 3: mod_base = OTHER; note = 2'-O-methyluridine-3'-phosphorothioate
  modified_base 4: mod_base = OTHER; note = 2'-O-methyladenosine-3'-phosphorothioate
  modified_base 5: mod_base = OTHER; note = 2'-O-methylguanosine-3'-phosphorothioate
  modified_base 6: mod_base = OTHER; note = 2'-deoxyadenosine-3'-phosphorothioate
  modified_base 7: mod_base = OTHER; note = 2'-deoxythymidine-3'-phosphorothioate
  modified_base 8: mod_base = OTHER; note = 2'-deoxyadenosine-3'-phosphorothioate
  modified_base 9: mod_base = OTHER; note = 2'-deoxythymidine-3'-phosphorothioate
  modified_base 10: mod_base = OTHER; note = 2'-deoxyadenosine-3'-phosphorothioate
  modified_base 11: mod_base = OTHER; note = 5'-methyl-deoxycytidine-3'-phosphorothioate
  modified_base 12: mod_base = OTHER; note = 2'-deoxyadenosine-3'-phosphorothioate
  modified_base 13: mod_base = OTHER; note = 2'-deoxyguanosine-3'-phosphorothioate
  modified_base 14: mod_base = OTHER; note = 2'-deoxythymidine-3'-phosphorothioate
  modified_base 15: mod_base = OTHER; note = 2'-deoxythymidine-3'-phosphorothioate
  modified_base 16: mod_base = OTHER; note = 2'-O-methylguanosine-3'-phosphorothioate
  modified_base 17: mod_base = OTHER; note = 2'-O-methylcytidine-3'-phosphorothioate
  modified_base 18: mod_base = OTHER; note = 2'-O-methyladenosine-3'-phosphorothioate
  modified_base 19: mod_base = OTHER; note = 2'-O-methylguanosine-3'-phosphorothioate
  modified_base 20: mod_base = OTHER; note = 2'-O-methylcytidine-3'-phosphate
  misc_feature 1..5: note = RNA
  misc_feature 6..15: note = DNA
  misc_feature 16..20: note = RNA
tgtagatatacagttgcagc

SEQ ID NO: 4192 - DNA, 20 bp, synthetic construct
  source 1..20: mol_type = other DNA; note = Description of Artificial Sequence: Synthetic oligonucleotide; note = Description of Combined DNA/RNA Molecule: Synthetic oligonucleotide
  modified_base 1: mod_base = OTHER; note = 2'-O-methyluridine-3'-phosphorothioate
  modified_base 2: mod_base = OTHER; note = 2'-O-methylcytidine-3'-phosphorothioate
  modified_base 3: mod_base = OTHER; note = 2'-O-methyluridine-3'-phosphorothioate
  modified_base 4: mod_base = OTHER; note = 2'-O-methylcytidine-3'-phosphorothioate
  modified_base 5: mod_base = OTHER; note = 2'-O-methylguanosine-3'-phosphorothioate
  modified_base 6: mod_base = OTHER; note = 2'-deoxyguanosine-3'-phosphorothioate
  modified_base 7: mod_base = OTHER; note = 2'-deoxythymidine-3'-phosphorothioate
  modified_base 8: mod_base = OTHER; note = 5'-methyl-deoxycytidine-3'-phosphorothioate
  modified_base 9: mod_base = OTHER; note = 5'-methyl-deoxycytidine-3'-phosphorothioate
  modified_base 10: mod_base = OTHER; note = 2'-deoxythymidine-3'-phosphorothioate
  modified_base 11: mod_base = OTHER; note = 2'-deoxythymidine-3'-phosphorothioate
  modified_base 12: mod_base = OTHER; note = 2'-deoxyguanosine-3'-phosphorothioate
  modified_base 13: mod_base = OTHER; note = 2'-deoxythymidine-3'-phosphorothioate
  modified_base 14: mod_base = OTHER; note = 2'-deoxyadenosine-3'-phosphorothioate
  modified_base 15: mod_base = OTHER; note = 2'-deoxyguanosine-3'-phosphorothioate
  modified_base 16: mod_base = OTHER; note = 2'-O-methyladenosine-3'-phosphorothioate
  modified_base 17: mod_base = OTHER; note = 2'-O-methyluridine-3'-phosphorothioate
  modified_base 18: mod_base = OTHER; note = 2'-O-methyladenosine-3'-phosphorothioate
  modified_base 19: mod_base = OTHER; note = 2'-O-methyluridine-3'-phosphorothioate
  modified_base 20: mod_base = OTHER; note = 2'-O-methyladenosine-3'-phosphate
  misc_feature 1..5: note = RNA
  misc_feature 6..15: note = DNA
  misc_feature 16..20: note = RNA
tctcggtccttgtagatata

SEQ ID NO: 4193 - DNA, 20 bp, synthetic construct
  source 1..20: mol_type = other DNA; note = Description of Artificial Sequence: Synthetic oligonucleotide; note = Description of Combined DNA/RNA Molecule: Synthetic oligonucleotide
  modified_base 1: mod_base = OTHER; note = 2'-O-methyluridine-3'-phosphorothioate
  modified_base 2: mod_base = OTHER; note = 2'-O-methyluridine-3'-phosphorothioate
  modified_base 3: mod_base = OTHER; note = 2'-O-methylcytidine-3'-phosphorothioate
  modified_base 4: mod_base = OTHER; note = 2'-O-methyluridine-3'-phosphorothioate
  modified_base 5: mod_base = OTHER; note = 2'-O-methyluridine-3'-phosphorothioate
  modified_base 6: mod_base = OTHER; note = 2'-deoxyguanosine-3'-phosphorothioate
  modified_base 7: mod_base = OTHER; note = 2'-deoxyguanosine-3'-phosphorothioate
  modified_base 8: mod_base = OTHER; note = 2'-deoxythymidine-3'-phosphorothioate
  modified_base 9: mod_base = OTHER; note = 2'-deoxyguanosine-3'-phosphorothioate
  modified_base 10: mod_base = OTHER; note = 2'-deoxyadenosine-3'-phosphorothioate
  modified_base 11: mod_base = OTHER; note = 5'-methyl-deoxycytidine-3'-phosphorothioate
  modified_base 12: mod_base = OTHER; note = 2'-deoxythymidine-3'-phosphorothioate
  modified_base 13: mod_base = OTHER; note = 2'-deoxythymidine-3'-phosphorothioate
  modified_base 14: mod_base = OTHER; note = 5'-methyl-deoxycytidine-3'-phosphorothioate
  modified_base 15: mod_base = OTHER; note = 2'-deoxythymidine-3'-phosphorothioate
  modified_base 16: mod_base = OTHER; note = 2'-O-methylcytidine-3'-phosphorothioate
  modified_base 17: mod_base = OTHER; note = 2'-O-methylguanosine-3'-phosphorothioate
  modified_base 18: mod_base = OTHER; note = 2'-O-methylguanosine-3'-phosphorothioate
  modified_base 19: mod_base = OTHER; note = 2'-O-methyluridine-3'-phosphorothioate
  modified_base 20: mod_base = OTHER; note = 2'-O-methylcytidine-3'-phosphate
  misc_feature 1..5: note = RNA
  misc_feature 6..15: note = DNA
  misc_feature 16..20: note = RNA
ttcttggtgacttctcggtc

SEQ ID NO: 4194 - DNA, 20 bp, synthetic construct
  source 1..20: mol_type = other DNA; note = Description of Artificial Sequence: Synthetic oligonucleotide; note = Description of Combined DNA/RNA Molecule: Synthetic oligonucleotide
  modified_base 1: mod_base = OTHER; note = 2'-O-methylcytidine-3'-phosphorothioate
  modified_base 2: mod_base = OTHER; note = 2'-O-methylcytidine-3'-phosphorothioate
  modified_base 3: mod_base = OTHER; note = 2'-O-methylguanosine-3'-phosphorothioate
  modified_base 4: mod_base = OTHER; note = 2'-O-methylcytidine-3'-phosphorothioate
  modified_base 5: mod_base = OTHER; note = 2'-O-methyladenosine-3'-phosphorothioate
  modified_base 6: mod_base = OTHER; note = 5'-methyl-deoxycytidine-3'-phosphorothioate
  modified_base 7: mod_base = OTHER; note = 2'-deoxythymidine-3'-phosphorothioate
  modified_base 8: mod_base = OTHER; note = 2'-deoxyadenosine-3'-phosphorothioate
  modified_base 9: mod_base = OTHER; note = 2'-deoxyguanosine-3'-phosphorothioate
  modified_base 10: mod_base = OTHER; note = 5'-methyl-deoxycytidine-3'-phosphorothioate
  modified_base 11: mod_base = OTHER; note = 2'-deoxythymidine-3'-phosphorothioate
  modified_base 12: mod_base = OTHER; note = 2'-deoxythymidine-3'-phosphorothioate
  modified_base 13: mod_base = OTHER; note = 5'-methyl-deoxycytidine-3'-phosphorothioate
  modified_base 14: mod_base = OTHER; note = 2'-deoxythymidine-3'-phosphorothioate
  modified_base 15: mod_base = OTHER; note = 2'-deoxythymidine-3'-phosphorothioate
  modified_base 16: mod_base = OTHER; note = 2'-O-methylguanosine-3'-phosphorothioate
  modified_base 17: mod_base = OTHER; note = 2'-O-methylguanosine-3'-phosphorothioate
  modified_base 18: mod_base = OTHER; note = 2'-O-methyluridine-3'-phosphorothioate
  modified_base 19: mod_base = OTHER; note = 2'-O-methylguanosine-3'-phosphorothioate
  modified_base 20: mod_base = OTHER; note = 2'-O-methyladenosine-3'-phosphate
  misc_feature 1..5: note = RNA
  misc_feature 6..15: note = DNA
  misc_feature 16..20: note = RNA
ccgcactagcttcttggtga

SEQ ID NO: 4195 - DNA, 20 bp, synthetic construct
  source 1..20: mol_type = other DNA; note = Description of Artificial Sequence: Synthetic oligonucleotide; note = Description of Combined DNA/RNA Molecule: Synthetic oligonucleotide
  modified_base 1: mod_base = OTHER; note = 2'-O-methylcytidine-3'-phosphorothioate
  modified_base 2: mod_base = OTHER; note = 2'-O-methyluridine-3'-phosphorothioate
  modified_base 3: mod_base = OTHER; note = 2'-O-methyluridine-3'-phosphorothioate
  modified_base 4: mod_base = OTHER; note = 2'-O-methylcytidine-3'-phosphorothioate
  modified_base 5: mod_base = OTHER; note = 2'-O-methyluridine-3'-phosphorothioate
  modified_base 6: mod_base = OTHER; note = 5'-methyl-deoxycytidine-3'-phosphorothioate
  modified_base 7: mod_base = OTHER; note = 2'-deoxythymidine-3'-phosphorothioate
  modified_base 8: mod_base = OTHER; note = 2'-deoxyguanosine-3'-phosphorothioate
  modified_base 9: mod_base = OTHER; note = 5'-methyl-deoxycytidine-3'-phosphorothioate
  modified_base 10: mod_base = OTHER; note = 5'-methyl-deoxycytidine-3'-phosphorothioate
  modified_base 11: mod_base = OTHER; note = 2'-deoxythymidine-3'-phosphorothioate
  modified_base 12: mod_base = OTHER; note = 2'-deoxyguanosine-3'-phosphorothioate
  modified_base 13: mod_base = OTHER; note = 5'-methyl-deoxycytidine-3'-phosphorothioate
  modified_base 14: mod_base = OTHER; note = 5'-methyl-deoxycytidine-3'-phosphorothioate
  modified_base 15: mod_base = OTHER; note = 2'-deoxyguanosine-3'-phosphorothioate
  modified_base 16: mod_base = OTHER; note = 2'-O-methylcytidine-3'-phosphorothioate
  modified_base 17: mod_base = OTHER; note = 2'-O-methyladenosine-3'-phosphorothioate
  modified_base 18: mod_base = OTHER; note = 2'-O-methylcytidine-3'-phosphorothioate
  modified_base 19: mod_base = OTHER; note = 2'-O-methyluridine-3'-phosphorothioate
  modified_base 20: mod_base = OTHER; note = 2'-O-methyladenosine-3'-phosphate
  misc_feature 1..5: note = RNA
  misc_feature 6..15: note = DNA
  misc_feature 16..20: note = RNA
cttctctgcctgccgcacta

SEQ ID NO: 4196 - DNA, 20 bp, synthetic construct
  source 1..20: mol_type = other DNA; note = Description of Artificial Sequence: Synthetic oligonucleotide; note = Description of Combined DNA/RNA Molecule: Synthetic oligonucleotide
  modified_base 1: mod_base = OTHER; note = 2'-O-methylcytidine-3'-phosphorothioate
  modified_base 2: mod_base = OTHER; note = 2'-O-methyluridine-3'-phosphorothioate
  modified_base 3: mod_base = OTHER; note = 2'-O-methyluridine-3'-phosphorothioate
  modified_base 4: mod_base = OTHER; note = 2'-O-methylguanosine-3'-phosphorothioate
  modified_base 5: mod_base = OTHER; note = 2'-O-methyluridine-3'-phosphorothioate
  modified_base 6: mod_base = OTHER; note = 2'-deoxyadenosine-3'-phosphorothioate
  modified_base 7: mod_base = OTHER; note = 2'-deoxyguanosine-3'-phosphorothioate
  modified_base 8: mod_base = OTHER; note = 5'-methyl-deoxycytidine-3'-phosphorothioate
  modified_base 9: mod_base = OTHER; note = 5'-methyl-deoxycytidine-3'-phosphorothioate
  modified_base 10: mod_base = OTHER; note = 5'-methyl-deoxycytidine-3'-phosphorothioate
  modified_base 11: mod_base = OTHER; note = 2'-deoxyadenosine-3'-phosphorothioate
  modified_base 12: mod_base = OTHER; note = 2'-deoxythymidine-3'-phosphorothioate
  modified_base 13: mod_base = OTHER; note = 5'-methyl-deoxycytidine-3'-phosphorothioate
  modified_base 14: mod_base = OTHER; note = 2'-deoxythymidine-3'-phosphorothioate
  modified_base 15: mod_base = OTHER; note = 2'-deoxythymidine-3'-phosphorothioate
  modified_base 16: mod_base = OTHER; note = 2'-O-methylcytidine-3'-phosphorothioate
  modified_base 17: mod_base = OTHER; note = 2'-O-methyluridine-3'-phosphorothioate
  modified_base 18: mod_base = OTHER; note = 2'-O-methylcytidine-3'-phosphorothioate
  modified_base 19: mod_base = OTHER; note = 2'-O-methyluridine-3'-phosphorothioate
  modified_base 20: mod_base = OTHER; note = 2'-O-methylguanosine-3'-phosphate
  misc_feature 1..5: note = RNA
  misc_feature 6..15: note = DNA
  misc_feature 16..20: note = RNA
cttgtagcccatcttctctg

SEQ ID NO: 4197 - DNA, 20 bp, synthetic construct
  source 1..20: mol_type = other DNA; note = Description of Artificial Sequence: Synthetic oligonucleotide; note = Description of Combined DNA/RNA Molecule: Synthetic oligonucleotide
  modified_base 1: mod_base = OTHER; note = 2'-O-methyladenosine-3'-phosphorothioate
  modified_base 2: mod_base = OTHER; note = 2'-O-methyladenosine-3'-phosphorothioate
  modified_base 3: mod_base = OTHER; note = 2'-O-methyladenosine-3'-phosphorothioate
  modified_base 4: mod_base = OTHER; note = 2'-O-methyluridine-3'-phosphorothioate
  modified_base 5: mod_base = OTHER; note = 2'-O-methyladenosine-3'-phosphorothioate
  modified_base 6: mod_base = OTHER; note = 2'-deoxythymidine-3'-phosphorothioate
  modified_base 7: mod_base = OTHER; note = 2'-deoxyguanosine-3'-phosphorothioate
  modified_base 8: mod_base = OTHER; note = 2'-deoxyguanosine-3'-phosphorothioate
  modified_base 9: mod_base = OTHER; note = 5'-methyl-deoxycytidine-3'-phosphorothioate
  modified_base 10: mod_base = OTHER; note = 5'-methyl-deoxycytidine-3'-phosphorothioate
  modified_base 11: mod_base = OTHER; note = 2'-deoxythymidine-3'-phosphorothioate
  modified_base 12: mod_base = OTHER; note = 2'-deoxythymidine-3'-phosphorothioate
  modified_base 13: mod_base = OTHER; note = 2'-deoxyguanosine-3'-phosphorothioate
  modified_base 14: mod_base = OTHER; note = 2'-deoxythymidine-3'-phosphorothioate
  modified_base 15: mod_base = OTHER; note = 2'-deoxyadenosine-3'-phosphorothioate
  modified_base 16: mod_base = OTHER; note = 2'-O-methylguanosine-3'-phosphorothioate
  modified_base 17: mod_base = OTHER; note = 2'-O-methylcytidine-3'-phosphorothioate
  modified_base 18: mod_base = OTHER; note = 2'-O-methylcytidine-3'-phosphorothioate
  modified_base 19: mod_base = OTHER; note = 2'-O-methylcytidine-3'-phosphorothioate
  modified_base 20: mod_base = OTHER; note = 2'-O-methyladenosine-3'-phosphate
  misc_feature 1..5: note = RNA
  misc_feature 6..15: note = DNA
  misc_feature 16..20: note = RNA
aaatatggccttgtagccca

SEQ ID NO: 4198 - DNA, 20 bp, synthetic construct
  source 1..20: mol_type = other DNA; note = Description of Artificial Sequence: Synthetic oligonucleotide; note = Description of Combined DNA/RNA Molecule: Synthetic oligonucleotide
  modified_base 1: mod_base = OTHER; note = 2'-O-methyluridine-3'-phosphorothioate
  modified_base 2: mod_base = OTHER; note = 2'-O-methylguanosine-3'-phosphorothioate
  modified_base 3: mod_base = OTHER; note = 2'-O-methyluridine-3'-phosphorothioate
  modified_base 4: mod_base = OTHER; note = 2'-O-methylcytidine-3'-phosphorothioate
  modified_base 5: mod_base = OTHER; note = 2'-O-methylcytidine-3'-phosphorothioate
  modified_base 6: mod_base = OTHER; note = 2'-deoxyadenosine-3'-phosphorothioate
  modified_base 7: mod_base = OTHER; note = 5'-methyl-deoxycytidine-3'-phosphorothioate
  modified_base 8: mod_base = OTHER; note = 2'-deoxythymidine-3'-phosphorothioate
  modified_base 9: mod_base = OTHER; note = 2'-deoxyguanosine-3'-phosphorothioate
  modified_base 10: mod_base = OTHER; note = 2'-deoxythymidine-3'-phosphorothioate
  modified_base 11: mod_base = OTHER; note = 5'-methyl-deoxycytidine-3'-phosphorothioate
  modified_base 12: mod_base = OTHER; note = 2'-deoxyadenosine-3'-phosphorothioate
  modified_base 13: mod_base = OTHER; note = 5'-methyl-deoxycytidine-3'-phosphorothioate
  modified_base 14: mod_base = OTHER; note = 2'-deoxyadenosine-3'-phosphorothioate
  modified_base 15: mod_base = OTHER; note = 2'-deoxyadenosine-3'-phosphorothioate
  modified_base 16: mod_base = OTHER; note = 2'-O-methyladenosine-3'-phosphorothioate
  modified_base 17: mod_base = OTHER; note = 2'-O-methyluridine-3'-phosphorothioate
  modified_base 18: mod_base = OTHER; note = 2'-O-methyladenosine-3'-phosphorothioate
  modified_base 19: mod_base = OTHER; note = 2'-O-methyluridine-3'-phosphorothioate
  modified_base 20: mod_base = OTHER; note = 2'-O-methylguanosine-3'-phosphate
  misc_feature 1..5: note = RNA
  misc_feature 6..15: note = DNA
  misc_feature 16..20: note = RNA
tgtccactgtcacaaatatg

SEQ ID NO: 4199 - DNA, 20 bp, synthetic construct
  source 1..20: mol_type = other DNA; note = Description of Artificial Sequence: Synthetic oligonucleotide; note = Description of Combined DNA/RNA Molecule: Synthetic oligonucleotide
  modified_base 1: mod_base = OTHER; note = 2'-O-methylcytidine-3'-phosphorothioate
  modified_base 2: mod_base = OTHER; note = 2'-O-methyladenosine-3'-phosphorothioate
  modified_base 3: mod_base = OTHER; note = 2'-O-methylguanosine-3'-phosphorothioate
  modified_base 4: mod_base = OTHER; note = 2'-O-methylguanosine-3'-phosphorothioate
  modified_base 5: mod_base = OTHER; note = 2'-O-methyluridine-3'-phosphorothioate
  modified_base 6: mod_base = OTHER; note = 2'-deoxyadenosine-3'-phosphorothioate
  modified_base 7: mod_base = OTHER; note = 2'-deoxyadenosine-3'-phosphorothioate
  modified_base 8: mod_base = OTHER; note = 2'-deoxyguanosine-3'-phosphorothioate
  modified_base 9: mod_base = OTHER; note = 2'-deoxyguanosine-3'-phosphorothioate
  modified_base 10: mod_base = OTHER; note = 2'-deoxythymidine-3'-phosphorothioate
  modified_base 11: mod_base = OTHER; note = 2'-deoxyguanosine-3'-phosphorothioate
  modified_base 12: mod_base = OTHER; note = 2'-deoxythymidine-3'-phosphorothioate
  modified_base 13: mod_base = OTHER; note = 2'-deoxyguanosine-3'-phosphorothioate
  modified_base 14: mod_base = OTHER; note = 2'-deoxythymidine-3'-phosphorothioate
  modified_base 15: mod_base = OTHER; note = 5'-methyl-deoxycytidine-3'-phosphorothioate
  modified_base 16: mod_base = OTHER; note = 2'-O-methylcytidine-3'-phosphorothioate
  modified_base 17: mod_base = OTHER; note = 2'-O-methyladenosine-3'-phosphorothioate
  modified_base 18: mod_base = OTHER; note = 2'-O-methylcytidine-3'-phosphorothioate
  modified_base 19: mod_base = OTHER; note = 2'-O-methyluridine-3'-phosphorothioate
  modified_base 20: mod_base = OTHER; note = 2'-O-methylguanosine-3'-phosphate
  misc_feature 1..5: note = RNA
  misc_feature 6..15: note = DNA
  misc_feature 16..20: note = RNA
caggtaaggtgtgtccactg

SEQ ID NO: 4200 - DNA, 20 bp, synthetic construct
  source 1..20: mol_type = other DNA; note = Description of Artificial Sequence: Synthetic oligonucleotide; note = Description of Combined DNA/RNA Molecule: Synthetic oligonucleotide
  modified_base 1: mod_base = OTHER; note = 2'-O-methylguanosine-3'-phosphorothioate
  modified_base 2: mod_base = OTHER; note = 2'-O-methyladenosine-3'-phosphorothioate
  modified_base 3: mod_base = OTHER; note = 2'-O-methylcytidine-3'-phosphorothioate
  modified_base 4: mod_base = OTHER; note = 2'-O-methylguanosine-3'-phosphorothioate
  modified_base 5: mod_base = OTHER; note = 2'-O-methylguanosine-3'-phosphorothioate
  modified_base 6: mod_base = OTHER; note = 2'-deoxythymidine-3'-phosphorothioate
  modified_base 7: mod_base = OTHER; note = 2'-deoxythymidine-3'-phosphorothioate
  modified_base 8: mod_base = OTHER; note = 2'-deoxyguanosine-3'-phosphorothioate
  modified_base 9: mod_base = OTHER; note = 5'-methyl-deoxycytidine-3'-phosphorothioate
  modified_base 10: mod_base = OTHER; note = 5'-methyl-deoxycytidine-3'-phosphorothioate
  modified_base 11: mod_base = OTHER; note = 5'-methyl-deoxycytidine-3'-phosphorothioate
  modified_base 12: mod_base = OTHER; note = 2'-deoxyadenosine-3'-phosphorothioate
  modified_base 13: mod_base = OTHER; note = 2'-deoxyguanosine-3'-phosphorothioate
  modified_base 14: mod_base = OTHER; note = 2'-deoxyguanosine-3'-phosphorothioate
  modified_base 15: mod_base = OTHER; note = 2'-deoxythymidine-3'-phosphorothioate
  modified_base 16: mod_base = OTHER; note = 2'-O-methyladenosine-3'-phosphorothioate
  modified_base 17: mod_base = OTHER; note = 2'-O-methyladenosine-3'-phosphorothioate
  modified_base 18: mod_base = OTHER; note = 2'-O-methylguanosine-3'-phosphorothioate
  modified_base 19: mod_base = OTHER; note = 2'-O-methylguanosine-3'-phosphorothioate
  modified_base 20: mod_base = OTHER; note = 2'-O-methyluridine-3'-phosphate
  misc_feature 1..5: note = RNA
  misc_feature 6..15: note = DNA
  misc_feature 16..20: note = RNA
gacggttgcccaggtaaggt

SEQ ID NO: 4201 - DNA, 20 bp, synthetic construct
  source 1..20: mol_type = other DNA; note = Description of Artificial Sequence: Synthetic oligonucleotide; note = Description of Combined DNA/RNA Molecule: Synthetic oligonucleotide
  modified_base 1: mod_base = OTHER; note = 2'-O-methylcytidine-3'-phosphorothioate
  modified_base 2: mod_base = OTHER; note = 2'-O-methyladenosine-3'-phosphorothioate
  modified_base 3: mod_base = OTHER; note = 2'-O-methylcytidine-3'-phosphorothioate
  modified_base 4: mod_base = OTHER; note = 2'-O-methyladenosine-3'-phosphorothioate
  modified_base 5: mod_base = OTHER; note = 2'-O-methyluridine-3'-phosphorothioate
  modified_base 6: mod_base = OTHER; note = 5'-methyl-deoxycytidine-3'-phosphorothioate
  modified_base 7: mod_base = OTHER; note = 2'-deoxyadenosine-3'-phosphorothioate
  modified_base 8: mod_base = OTHER; note = 2'-deoxythymidine-3'-phosphorothioate
  modified_base 9: mod_base = OTHER; note = 5'-methyl-deoxycytidine-3'-phosphorothioate
  modified_base 10: mod_base = OTHER; note = 5'-methyl-deoxycytidine-3'-phosphorothioate
  modified_base 11: mod_base = OTHER; note = 2'-deoxyadenosine-3'-phosphorothioate
  modified_base 12: mod_base = OTHER; note = 2'-deoxyguanosine-3'-phosphorothioate
  modified_base 13: mod_base = OTHER; note = 2'-deoxyadenosine-3'-phosphorothioate
  modified_base 14: mod_base = OTHER; note = 5'-methyl-deoxycytidine-3'-phosphorothioate
  modified_base 15: mod_base = OTHER; note = 2'-deoxyguanosine-3'-phosphorothioate
  modified_base 16: mod_base = OTHER; note = 2'-O-methylguanosine-3'-phosphorothioate
  modified_base 17: mod_base = OTHER; note = 2'-O-methyluridine-3'-phosphorothioate
  modified_base 18: mod_base = OTHER; note = 2'-O-methyluridine-3'-phosphorothioate
  modified_base 19: mod_base = OTHER; note = 2'-O-methylguanosine-3'-phosphorothioate
  modified_base 20: mod_base = OTHER; note = 2'-O-methylcytidine-3'-phosphate
  misc_feature 1..5: note = RNA
  misc_feature 6..15: note = DNA
  misc_feature 16..20: note = RNA
cacatcatccagacggttgc

SEQ ID NO: 4202 - DNA, 20 bp, synthetic construct
  source 1..20: mol_type = other DNA; note = Description of Artificial Sequence: Synthetic oligonucleotide; note = Description of Combined DNA/RNA Molecule: Synthetic oligonucleotide
  modified_base 1: mod_base = OTHER; note = 2'-O-methyladenosine-3'-phosphorothioate
  modified_base 2: mod_base = OTHER; note = 2'-O-methyladenosine-3'-phosphorothioate
  modified_base 3: mod_base = OTHER; note = 2'-O-methyluridine-3'-phosphorothioate
  modified_base 4: mod_base = OTHER; note = 2'-O-methylcytidine-3'-phosphorothioate
  modified_base 5: mod_base = OTHER; note = 2'-O-methyluridine-3'-phosphorothioate
  modified_base 6: mod_base = OTHER; note = 2'-deoxyguanosine-3'-phosphorothioate
  modified_base 7: mod_base = OTHER; note = 2'-deoxythymidine-3'-phosphorothioate
  modified_base 8: mod_base = OTHER; note = 2'-deoxythymidine-3'-phosphorothioate
  modified_base 9: mod_base = OTHER; note = 2'-deoxyadenosine-3'-phosphorothioate
  modified_base 10: mod_base = OTHER; note = 5'-methyl-deoxycytidine-3'-phosphorothioate
  modified_base 11: mod_base = OTHER; note = 2'-deoxyguanosine-3'-phosphorothioate
  modified_base 12: mod_base = OTHER; note = 5'-methyl-deoxycytidine-3'-phosphorothioate
  modified_base 13: mod_base = OTHER; note = 2'-deoxyadenosine-3'-phosphorothioate
  modified_base 14: mod_base = OTHER; note = 5'-methyl-deoxycytidine-3'-phosphorothioate
  modified_base 15: mod_base = OTHER; note = 2'-deoxyadenosine-3'-phosphorothioate
  modified_base 16: mod_base = OTHER; note = 2'-O-methyluridine-3'-phosphorothioate
  modified_base 17: mod_base = OTHER; note = 2'-O-methylcytidine-3'-phosphorothioate
  modified_base 18: mod_base = OTHER; note = 2'-O-methyladenosine-3'-phosphorothioate
  modified_base 19: mod_base = OTHER; note = 2'-O-methyluridine-3'-phosphorothioate
  modified_base 20: mod_base = OTHER; note = 2'-O-methylcytidine-3'-phosphate
  misc_feature 1..5: note = RNA
  misc_feature 6..15: note = DNA
  misc_feature 16..20: note = RNA
aatctgttacgcacatcatc

SEQ ID NO: 4203 - DNA, 20 bp, synthetic construct
  source 1..20: mol_type = other DNA; note = Description of Artificial Sequence: Synthetic oligonucleotide; note = Description of Combined DNA/RNA Molecule: Synthetic oligonucleotide
  modified_base 1: mod_base = OTHER; note = 2'-O-methylguanosine-3'-phosphorothioate
  modified_base 2: mod_base = OTHER; note = 2'-O-methylcytidine-3'-phosphorothioate
  modified_base 3: mod_base = OTHER; note = 2'-O-methylguanosine-3'-phosphorothioate
  modified_base 4: mod_base = OTHER; note = 2'-O-methylguanosine-3'-phosphorothioate
  modified_base 5: mod_base = OTHER; note = 2'-O-methylcytidine-3'-phosphorothioate
  modified_base 6: mod_base = OTHER; note = 2'-deoxyadenosine-3'-phosphorothioate
  modified_base 7: mod_base = OTHER; note = 2'-deoxyguanosine-3'-phosphorothioate
  modified_base 8: mod_base = OTHER; note = 2'-deoxythymidine-3'-phosphorothioate
  modified_base 9: mod_base = OTHER; note = 2'-deoxythymidine-3'-phosphorothioate
  modified_base 10: mod_base = OTHER; note = 2'-deoxythymidine-3'-phosphorothioate
  modified_base 11: mod_base = OTHER; note = 2'-deoxyguanosine-3'-phosphorothioate
  modified_base 12: mod_base = OTHER; note = 2'-deoxyadenosine-3'-phosphorothioate
  modified_base 13: mod_base = OTHER; note = 2'-deoxyadenosine-3'-phosphorothioate
  modified_base 14: mod_base = OTHER; note = 2'-deoxythymidine-3'-phosphorothioate
  modified_base 15: mod_base = OTHER; note = 5'-methyl-deoxycytidine-3'-phosphorothioate
  modified_base 16: mod_base = OTHER; note = 2'-O-methyluridine-3'-phosphorothioate
  modified_base 17: mod_base = OTHER; note = 2'-O-methylguanosine-3'-phosphorothioate
  modified_base 18: mod_base = OTHER; note = 2'-O-methyluridine-3'-phosphorothioate
  modified_base 19: mod_base = OTHER; note = 2'-O-methyluridine-3'-phosphorothioate
  modified_base 20: mod_base = OTHER; note = 2'-O-methyladenosine-3'-phosphate
  misc_feature 1..5: note = RNA
  misc_feature 6..15: note = DNA
  misc_feature 16..20: note = RNA
gcggcagtttgaatctgtta

SEQ ID NO: 4204 - DNA, 20 bp, synthetic construct
  source 1..20: mol_type = other DNA; note = Description of Artificial Sequence: Synthetic oligonucleotide; note = Description of Combined DNA/RNA Molecule: Synthetic oligonucleotide
  modified_base 1: mod_base = OTHER; note = 2'-O-methylcytidine-3'-phosphorothioate
  modified_base 2: mod_base = OTHER; note = 2'-O-methyluridine-3'-phosphorothioate
  modified_base 3: mod_base = OTHER; note = 2'-O-methylguanosine-3'-phosphorothioate
  modified_base 4: mod_base = OTHER; note = 2'-O-methyladenosine-3'-phosphorothioate
  modified_base 5: mod_base = OTHER; note = 2'-O-methylguanosine-3'-phosphorothioate
  modified_base 6: mod_base = OTHER; note = 2'-deoxythymidine-3'-phosphorothioate
  modified_base 7: mod_base = OTHER; note = 2'-deoxythymidine-3'-phosphorothioate
  modified_base 8: mod_base = OTHER; note = 2'-deoxyguanosine-3'-phosphorothioate
  modified_base 9: mod_base = OTHER; note = 2'-deoxythymidine-3'-phosphorothioate
  modified_base 10: mod_base = OTHER; note = 2'-deoxyguanosine-3'-phosphorothioate
  modified_base 11: mod_base = OTHER; note = 2'-deoxyguanosine-3'-phosphorothioate
  modified_base 12: mod_base = OTHER; note = 5'-methyl-deoxycytidine-3'-phosphorothioate
  modified_base 13: mod_base = OTHER; note = 2'-deoxyguanosine-3'-phosphorothioate
  modified_base 14: mod_base = OTHER; note = 2'-deoxyguanosine-3'-phosphorothioate
  modified_base 15: mod_base = OTHER; note = 5'-methyl-deoxycytidine-3'-phosphorothioate
  modified_base 16: mod_base = OTHER; note = 2'-O-methyladenosine-3'-phosphorothioate
  modified_base 17: mod_base = OTHER; note = 2'-O-methylguanosine-3'-phosphorothioate
  modified_base 18: mod_base = OTHER; note = 2'-O-methyluridine-3'-phosphorothioate
  modified_base 19: mod_base = OTHER; note = 2'-O-methyluridine-3'-phosphorothioate
  modified_base 20: mod_base = OTHER; note = 2'-O-methyluridine-3'-phosphate
  misc_feature 1..5: note = RNA
  misc_feature 6..15: note = DNA
  misc_feature 16..20: note = RNA
ctgagttgtggcggcagttt

SEQ ID NO: 4205 - DNA, 20 bp, synthetic construct
  source 1..20: mol_type = other DNA; note = Description of Artificial Sequence: Synthetic oligonucleotide; note = Description of Combined DNA/RNA Molecule: Synthetic oligonucleotide
  modified_base 1: mod_base = OTHER; note = 2'-O-methyladenosine-3'-phosphorothioate
  modified_base 2: mod_base = OTHER; note = 2'-O-methyladenosine-3'-phosphorothioate
  modified_base 3: mod_base = OTHER; note = 2'-O-methyladenosine-3'-phosphorothioate
  modified_base 4: mod_base = OTHER; note = 2'-O-methyladenosine-3'-phosphorothioate
  modified_base 5: mod_base = OTHER; note = 2'-O-methyluridine-3'-phosphorothioate
  modified_base 6: mod_base = OTHER; note = 2'-deoxythymidine-3'-phosphorothioate
  modified_base 7: mod_base = OTHER; note = 2'-deoxythymidine-3'-phosphorothioate
  modified_base 8: mod_base = OTHER; note = 2'-deoxythymidine-3'-phosphorothioate
  modified_base 9: mod_base = OTHER; note = 2'-deoxythymidine-3'-phosphorothioate
  modified_base 10: mod_base = OTHER; note = 5'-methyl-deoxycytidine-3'-phosphorothioate
  modified_base 11: mod_base = OTHER; note = 2'-deoxyadenosine-3'-phosphorothioate
  modified_base 12: mod_base = OTHER; note = 2'-deoxythymidine-3'-phosphorothioate
  modified_base 13: mod_base = OTHER; note = 5'-methyl-deoxycytidine-3'-phosphorothioate
  modified_base 14: mod_base = OTHER; note = 5'-methyl-deoxycytidine-3'-phosphorothioate
  modified_base 15: mod_base = OTHER; note = 2'-deoxythymidine-3'-phosphorothioate
  modified_base 16: mod_base = OTHER; note = 2'-O-methylguanosine-3'-phosphorothioate
  modified_base 17: mod_base = OTHER; note = 2'-O-methyladenosine-3'-phosphorothioate
  modified_base 18: mod_base = OTHER; note = 2'-O-methylguanosine-3'-phosphorothioate
  modified_base 19: mod_base = OTHER; note = 2'-O-methyluridine-3'-phosphorothioate
  modified_base 20: mod_base = OTHER; note = 2'-O-methyluridine-3'-phosphate
  misc_feature 1..5: note = RNA
  misc_feature 6..15: note = DNA
  misc_feature 16..20: note = RNA
aaaatttttcatcctgagtt

SEQ ID NO: 4206 - DNA, 20 bp, synthetic construct
  source 1..20: mol_type = other DNA; note = Description of Artificial Sequence: Synthetic oligonucleotide; note = Description of Combined DNA/RNA Molecule: Synthetic oligonucleotide
  modified_base 1: mod_base = OTHER; note = 2'-O-methyluridine-3'-phosphorothioate
  modified_base 2: mod_base = OTHER; note = 2'-O-methyladenosine-3'-phosphorothioate
  modified_base 3: mod_base = OTHER; note = 2'-O-methylcytidine-3'-phosphorothioate
  modified_base 4: mod_base = OTHER; note = 2'-O-methyluridine-3'-phosphorothioate
  modified_base 5: mod_base = OTHER; note = 2'-O-methylguanosine-3'-phosphorothioate
  modified_base 6: mod_base = OTHER; note = 2'-deoxyguanosine-3'-phosphorothioate
  modified_base 7: mod_base = OTHER; note = 2'-deoxythymidine-3'-phosphorothioate
  modified_base 8: mod_base = OTHER; note = 2'-deoxythymidine-3'-phosphorothioate
  modified_base 9: mod_base = OTHER; note = 2'-deoxythymidine-3'-phosphorothioate
  modified_base 10: mod_base = OTHER; note = 5'-methyl-deoxycytidine-3'-phosphorothioate
  modified_base 11: mod_base = OTHER; note = 2'-deoxyadenosine-3'-phosphorothioate
  modified_base 12: mod_base = OTHER; note = 2'-deoxyadenosine-3'-phosphorothioate
  modified_base 13: mod_base = OTHER; note = 2'-deoxyadenosine-3'-phosphorothioate
  modified_base 14: mod_base = OTHER; note = 2'-deoxyadenosine-3'-phosphorothioate
  modified_base 15: mod_base = OTHER; note = 2'-deoxythymidine-3'-phosphorothioate
  modified_base 16: mod_base = OTHER; note = 2'-O-methyluridine-3'-phosphorothioate
  modified_base 17: mod_base = OTHER; note = 2'-O-methyluridine-3'-phosphorothioate
  modified_base 18: mod_base = OTHER; note = 2'-O-methyluridine-3'-phosphorothioate
  modified_base 19: mod_base = OTHER; note = 2'-O-methyluridine-3'-phosphorothioate
  modified_base 20: mod_base = OTHER; note = 2'-O-methylcytidine-3'-phosphate
  misc_feature 1..5: note = RNA
  misc_feature 6..15: note = DNA
  misc_feature 16..20: note = RNA
tactggtttcaaaatttttc

SEQ ID NO: 4207 - DNA, 20 bp, synthetic construct
  source 1..20: mol_type = other DNA; note = Description of Artificial Sequence: Synthetic oligonucleotide; note = Description of Combined DNA/RNA Molecule: Synthetic oligonucleotide
  modified_base 1: mod_base = OTHER; note = 2'-O-methyladenosine-3'-phosphorothioate
  modified_base 2: mod_base = OTHER; note = 2'-O-methyladenosine-3'-phosphorothioate
  modified_base 3: mod_base = OTHER; note = 2'-O-methyladenosine-3'-phosphorothioate
  modified_base 4: mod_base = OTHER; note = 2'-O-methyluridine-3'-phosphorothioate
  modified_base 5: mod_base = OTHER; note = 2'-O-methylguanosine-3'-phosphorothioate
  modified_base 6: mod_base = OTHER; note = 2'-deoxyadenosine-3'-phosphorothioate
  modified_base 7: mod_base = OTHER; note = 2'-deoxythymidine-3'-phosphorothioate
  modified_base 8: mod_base = OTHER; note = 2'-deoxyadenosine-3'-phosphorothioate
  modified_base 9: mod_base = OTHER; note = 2'-deoxyadenosine-3'-phosphorothioate
  modified_base 10: mod_base = OTHER; note = 2'-deoxyadenosine-3'-phosphorothioate
  modified_base 11: mod_base = OTHER; note = 2'-deoxyguanosine-3'-phosphorothioate
  modified_base 12: mod_base = OTHER; note = 2'-deoxythymidine-3'-phosphorothioate
  modified_base 13: mod_base = OTHER; note = 2'-deoxyadenosine-3'-phosphorothioate
  modified_base 14: mod_base = OTHER; note = 5'-methyl-deoxycytidine-3'-phosphorothioate
  modified_base 15: mod_base = OTHER; note = 2'-deoxythymidine-3'-phosphorothioate
  modified_base 16: mod_base = OTHER; note = 2'-O-methylguanosine-3'-phosphorothioate
  modified_base 17: mod_base = OTHER; note = 2'-O-methylguanosine-3'-phosphorothioate
  modified_base 18: mod_base = OTHER; note = 2'-O-methyluridine-3'-phosphorothioate
  modified_base 19: mod_base = OTHER; note = 2'-O-methyluridine-3'-phosphorothioate
  modified_base 20: mod_base = OTHER; note = 2'-O-methyluridine-3'-phosphate
  misc_feature 1..5: note = RNA
  misc_feature 6..15: note = DNA
  misc_feature 16..20: note = RNA
aaatgataaagtactggttt

SEQ ID NO: 4208 - DNA, 20 bp, synthetic construct
  source 1..20: mol_type = other DNA; note = Description of Artificial Sequence: Synthetic oligonucleotide; note = Description of Combined DNA/RNA Molecule: Synthetic oligonucleotide
  modified_base 1: mod_base = OTHER; note = 2'-O-methylcytidine-3'-phosphorothioate
  modified_base 2: mod_base = OTHER; note = 2'-O-methylcytidine-3'-phosphorothioate
  modified_base 3: mod_base = OTHER; note = 2'-O-methyluridine-3'-phosphorothioate
  modified_base 4: mod_base = OTHER; note = 2'-O-methylcytidine-3'-phosphorothioate
  modified_base 5: mod_base = OTHER; note = 2'-O-methyladenosine-3'-phosphorothioate
  modified_base 6: mod_base = OTHER; note = 2'-deoxyguanosine-3'-phosphorothioate
  modified_base 7: mod_base = OTHER; note = 2'-deoxyguanosine-3'-phosphorothioate
  modified_base 8: mod_base = OTHER; note = 2'-deoxyadenosine-3'-phosphorothioate
  modified_base 9: mod_base = OTHER; note = 2'-deoxyguanosine-3'-phosphorothioate
  modified_base 10: mod_base = OTHER; note = 2'-deoxyadenosine-3'-phosphorothioate
  modified_base 11: mod_base = OTHER; note = 2'-deoxyadenosine-3'-phosphorothioate
  modified_base 12: mod_base = OTHER; note = 2'-deoxyadenosine-3'-phosphorothioate
  modified_base 13: mod_base = OTHER; note = 2'-deoxyadenosine-3'-phosphorothioate
  modified_base 14: mod_base = OTHER; note = 2'-deoxythymidine-3'-phosphorothioate
  modified_base 15: mod_base = OTHER; note = 2'-deoxyguanosine-3'-phosphorothioate
  modified_base 16: mod_base = OTHER; note = 2'-O-methyladenosine-3'-phosphorothioate
  modified_base 17: mod_base = OTHER; note = 2'-O-methyluridine-3'-phosphorothioate
  modified_base 18: mod_base = OTHER; note = 2'-O-methyladenosine-3'-phosphorothioate
  modified_base 19: mod_base = OTHER; note = 2'-O-methyladenosine-3'-phosphorothioate
  modified_base 20: mod_base = OTHER; note = 2'-O-methyladenosine-3'-phosphate
  misc_feature 1..5: note = RNA
  misc_feature 6..15: note = DNA
  misc_feature 16..20: note = RNA
cctcaggagaaaatgataaa

SEQ ID NO: 4209 - DNA, 20 bp, synthetic construct
  source 1..20: mol_type = other DNA; note = Description of Artificial Sequence: Synthetic oligonucleotide; note = Description of Combined DNA/RNA Molecule: Synthetic oligonucleotide
  modified_base 1: mod_base = OTHER; note = 2'-O-methyluridine-3'-phosphorothioate
  modified_base 2: mod_base = OTHER; note = 2'-O-methylcytidine-3'-phosphorothioate
  modified_base 3: mod_base = OTHER; note = 2'-O-methylcytidine-3'-phosphorothioate
  modified_base 4: mod_base = OTHER; note = 2'-O-methyladenosine-3'-phosphorothioate
  modified_base 5: mod_base = OTHER; note = 2'-O-methyladenosine-3'-phosphorothioate
  modified_base 6: mod_base = OTHER; note = 2'-deoxyadenosine-3'-phosphorothioate
  modified_base 7: mod_base = OTHER; note = 2'-deoxyadenosine-3'-phosphorothioate
  modified_base 8: mod_base = OTHER; note = 2'-deoxythymidine-3'-phosphorothioate
  modified_base 9: mod_base = OTHER; note = 2'-deoxythymidine-3'-phosphorothioate
  modified_base 10: mod_base = OTHER; note = 2'-deoxythymidine-3'-phosphorothioate
  modified_base 11: mod_base = OTHER; note = 2'-deoxythymidine-3'-phosphorothioate
  modified_base 12: mod_base = OTHER; note = 5'-methyl-deoxycytidine-3'-phosphorothioate
  modified_base 13: mod_base = OTHER; note = 5'-methyl-deoxycytidine-3'-phosphorothioate
  modified_base 14: mod_base = OTHER; note = 2'-deoxythymidine-3'-phosphorothioate
  modified_base 15: mod_base = OTHER; note = 5'-methyl-deoxycytidine-3'-phosphorothioate
  modified_base 16: mod_base = OTHER; note = 2'-O-methyladenosine-3'-phosphorothioate
  modified_base 17: mod_base = OTHER; note = 2'-O-methylguanosine-3'-phosphorothioate
  modified_base 18: mod_base = OTHER; note = 2'-O-methylguanosine-3'-phosphorothioate
  modified_base 19: mod_base = OTHER; note = 2'-O-methyladenosine-3'-phosphorothioate
  modified_base 20: mod_base = OTHER; note = 2'-O-methylguanosine-3'-phosphate
  misc_feature 1..5: note = RNA
  misc_feature 6..15: note = DNA
  misc_feature 16..20: note = RNA
tccaaaattttcctcaggag

SEQ ID NO: 4210 - DNA, 20 bp, synthetic construct
  source 1..20: mol_type = other DNA; note = Description of Artificial Sequence: Synthetic oligonucleotide; note = Description of Combined DNA/RNA Molecule: Synthetic oligonucleotide
  modified_base 1: mod_base = OTHER; note = 2'-O-methylguanosine-3'-phosphorothioate
  modified_base 2: mod_base = OTHER; note = 2'-O-methyluridine-3'-phosphorothioate
  modified_base 3: mod_base = OTHER; note = 2'-O-methylcytidine-3'-phosphorothioate
  modified_base 4: mod_base = OTHER; note = 2'-O-methylcytidine-3'-phosphorothioate
  modified_base 5: mod_base = OTHER; note = 2'-O-methyladenosine-3'-phosphorothioate
  modified_base 6: mod_base = OTHER; note = 5'-methyl-deoxycytidine-3'-phosphorothioate
  modified_base 7: mod_base = OTHER; note = 2'-deoxythymidine-3'-phosphorothioate
  modified_base 8: mod_base = OTHER; note = 2'-deoxyguanosine-3'-phosphorothioate
  modified_base 9: mod_base = OTHER; note = 2'-deoxythymidine-3'-phosphorothioate
  modified_base 10: mod_base = OTHER; note = 5'-methyl-deoxycytidine-3'-phosphorothioate
  modified_base 11: mod_base = OTHER; note = 2'-deoxyguanosine-3'-phosphorothioate
  modified_base 12: mod_base = OTHER; note = 2'-deoxythymidine-3'-phosphorothioate
  modified_base 13: mod_base = OTHER; note = 5'-methyl-deoxycytidine-3'-phosphorothioate
  modified_base 14: mod_base = OTHER; note = 2'-deoxythymidine-3'-phosphorothioate
  modified_base 15: mod_base = OTHER; note = 5'-methyl-deoxycytidine-3'-phosphorothioate
  modified_base 16: mod_base = OTHER; note = 2'-O-methylcytidine-3'-phosphorothioate
  modified_base 17: mod_base = OTHER; note = 2'-O-methyladenosine-3'-phosphorothioate
  modified_base 18: mod_base = OTHER; note = 2'-O-methyladenosine-3'-phosphorothioate
  modified_base 19: mod_base = OTHER; note = 2'-O-methyladenosine-3'-phosphorothioate
  modified_base 20: mod_base = OTHER; note = 2'-O-methyladenosine-3'-phosphate
  misc_feature 1..5: note = RNA
  misc_feature 6..15: note = DNA
  misc_feature 16..20: note = RNA
gtccactgtcgtctccaaaa

SEQ ID NO: 4211 - DNA, 20 bp, synthetic construct
  source 1..20: mol_type = other DNA; note = Description of Artificial Sequence: Synthetic oligonucleotide; note = Description of Combined DNA/RNA Molecule: Synthetic oligonucleotide
  modified_base 1: mod_base = OTHER; note = 2'-O-methyladenosine-3'-phosphorothioate
  modified_base 2: mod_base = OTHER; note = 2'-O-methyluridine-3'-phosphorothioate
  modified_base 3: mod_base = OTHER; note = 2'-O-methyladenosine-3'-phosphorothioate
  modified_base 4: mod_base = OTHER; note = 2'-O-methyluridine-3'-phosphorothioate
  modified_base 5: mod_base = OTHER; note = 2'-O-methylguanosine-3'-phosphorothioate
  modified_base 6: mod_base = OTHER; note = 5'-methyl-deoxycytidine-3'-phosphorothioate
  modified_base 7: mod_base = OTHER; note = 2'-deoxyadenosine-3'-phosphorothioate
  modified_base 8: mod_base = OTHER; note = 2'-deoxyguanosine-3'-phosphorothioate
  modified_base 9: mod_base = OTHER; note = 5'-methyl-deoxycytidine-3'-phosphorothioate
  modified_base 10: mod_base = OTHER; note = 2'-deoxyadenosine-3'-phosphorothioate
  modified_base 11: mod_base = OTHER; note = 2'-deoxyadenosine-3'-phosphorothioate
  modified_base 12: mod_base = OTHER; note = 2'-deoxyguanosine-3'-phosphorothioate
  modified_base 13: mod_base = OTHER; note = 2'-deoxythymidine-3'-phosphorothioate
  modified_base 14: mod_base = OTHER; note = 5'-methyl-deoxycytidine-3'-phosphorothioate
  modified_base 15: mod_base = OTHER; note = 5'-methyl-deoxycytidine-3'-phosphorothioate
  modified_base 16: mod_base = OTHER; note = 2'-O-methyladenosine-3'-phosphorothioate
  modified_base 17: mod_base = OTHER; note = 2'-O-methylcytidine-3'-phosphorothioate
  modified_base 18: mod_base = OTHER; note = 2'-O-methyluridine-3'-phosphorothioate
  modified_base 19: mod_base = OTHER; note = 2'-O-methylguanosine-3'-phosphorothioate
  modified_base 20: mod_base = OTHER; note = 2'-O-methyluridine-3'-phosphate
  misc_feature 1..5: note = RNA
  misc_feature 6..15: note = DNA
  misc_feature 16..20: note = RNA
atatgcagcaagtccactgt

SEQ ID NO: 4212 - DNA, 20 bp, synthetic construct
  source 1..20: mol_type = other DNA; note = Description of Artificial Sequence: Synthetic oligonucleotide; note = Description of Combined DNA/RNA Molecule: Synthetic oligonucleotide
  modified_base 1: mod_base = OTHER; note = 2'-O-methyluridine-3'-phosphorothioate
  modified_base 2: mod_base = OTHER; note = 2'-O-methyluridine-3'-phosphorothioate
  modified_base 3: mod_base = OTHER; note = 2'-O-methyluridine-3'-phosphorothioate
  modified_base 4: mod_base = OTHER; note = 2'-O-methyladenosine-3'-phosphorothioate
  modified_base 5: mod_base = OTHER; note = 2'-O-methylguanosine-3'-phosphorothioate
  modified_base 6: mod_base = OTHER; note = 5'-methyl-deoxycytidine-3'-phosphorothioate
  modified_base 7: mod_base = OTHER; note = 5'-methyl-deoxycytidine-3'-phosphorothioate
  modified_base 8: mod_base = OTHER; note = 2'-deoxyadenosine-3'-phosphorothioate
  modified_base 9: mod_base = OTHER; note = 5'-methyl-deoxycytidine-3'-phosphorothioate
  modified_base 10: mod_base = OTHER; note = 2'-deoxyadenosine-3'-phosphorothioate
  modified_base 11: mod_base = OTHER; note = 2'-deoxythymidine-3'-phosphorothioate
  modified_base 12: mod_base = OTHER; note = 2'-deoxyadenosine-3'-phosphorothioate
  modified_base 13: mod_base = OTHER; note = 2'-deoxythymidine-3'-phosphorothioate
  modified_base 14: mod_base = OTHER; note = 2'-deoxyguanosine-3'-phosphorothioate
  modified_base 15: mod_base = OTHER; note = 5'-methyl-deoxycytidine-3'-phosphorothioate
  modified_base 16: mod_base = OTHER; note = 2'-O-methyladenosine-3'-phosphorothioate
  modified_base 17: mod_base = OTHER; note = 2'-O-methylguanosine-3'-phosphorothioate
  modified_base 18: mod_base = OTHER; note = 2'-O-methylcytidine-3'-phosphorothioate
  modified_base 19: mod_base = OTHER; note = 2'-O-methyladenosine-3'-phosphorothioate
  modified_base 20: mod_base = OTHER; note = 2'-O-methyladenosine-3'-phosphate
  misc_feature 1..5: note = RNA
  misc_feature 6..15: note = DNA
  misc_feature 16..20: note = RNA
tttagccacatatgcagcaa

SEQ ID NO: 4213 - DNA, 20 bp, synthetic construct
  source 1..20: mol_type = other DNA; note = Description of Artificial Sequence: Synthetic oligonucleotide; note = Description of Combined DNA/RNA Molecule: Synthetic oligonucleotide
  modified_base 1: mod_base = OTHER; note = 2'-O-methyluridine-3'-phosphorothioate
  modified_base 2: mod_base = OTHER; note = 2'-O-methylguanosine-3'-phosphorothioate
  modified_base 3: mod_base = OTHER; note = 2'-O-methylguanosine-3'-phosphorothioate
  modified_base 4: mod_base = OTHER; note = 2'-O-methylguanosine-3'-phosphorothioate
  modified_base 5: mod_base = OTHER; note = 2'-O-methyluridine-3'-phosphorothioate
  modified_base 6: mod_base = OTHER; note = 5'-methyl-deoxycytidine-3'-phosphorothioate
  modified_base 7: mod_base = OTHER; note = 2'-deoxythymidine-3'-phosphorothioate
  modified_base 8: mod_base = OTHER; note = 2'-deoxyadenosine-3'-phosphorothioate
  modified_base 9: mod_base = OTHER; note = 2'-deoxythymidine-3'-phosphorothioate
  modified_base 10: mod_base = OTHER; note = 2'-deoxythymidine-3'-phosphorothioate
  modified_base 11: mod_base = OTHER; note = 2'-deoxyguanosine-3'-phosphorothioate
  modified_base 12: mod_base = OTHER; note = 5'-methyl-deoxycytidine-3'-phosphorothioate
  modified_base 13: mod_base = OTHER; note = 2'-deoxythymidine-3'-phosphorothioate
  modified_base 14: mod_base = OTHER; note = 2'-deoxythymidine-3'-phosphorothioate
  modified_base 15: mod_base = OTHER; note = 2'-deoxythymidine-3'-phosphorothioate
  modified_base 16: mod_base = OTHER; note = 2'-O-methyladenosine-3'-phosphorothioate
  modified_base 17: mod_base = OTHER; note = 2'-O-methylguanosine-3'-phosphorothioate
  modified_base 18: mod_base = OTHER; note = 2'-O-methylcytidine-3'-phosphorothioate
  modified_base 19: mod_base = OTHER; note = 2'-O-methylcytidine-3'-phosphorothioate
  modified_base 20: mod_base = OTHER; note = 2'-O-methyladenosine-3'-phosphate
  misc_feature 1..5: note = RNA
  misc_feature 6..15: note = DNA
  misc_feature 16..20: note = RNA
tgggtctattgctttagcca

SEQ ID NO: 4214 - DNA, 20 bp, synthetic construct
  source 1..20: mol_type = other DNA; note = Description of Artificial Sequence: Synthetic oligonucleotide; note = Description of Combined DNA/RNA Molecule: Synthetic oligonucleotide
  modified_base 1: mod_base = OTHER; note = 2'-O-methyladenosine-3'-phosphorothioate
  modified_base 2: mod_base = OTHER; note = 2'-O-methylguanosine-3'-phosphorothioate
  modified_base 3: mod_base = OTHER; note = 2'-O-methylcytidine-3'-phosphorothioate
  modified_base 4: mod_base = OTHER; note = 2'-O-methyluridine-3'-phosphorothioate
  modified_base 5: mod_base = OTHER; note = 2'-O-methylguanosine-3'-phosphorothioate
  modified_base 6: mod_base = OTHER; note = 2'-deoxyadenosine-3'-phosphorothioate
  modified_base 7: mod_base = OTHER; note = 2'-deoxythymidine-3'-phosphorothioate
  modified_base 8: mod_base = OTHER; note = 2'-deoxyadenosine-3'-phosphorothioate
  modified_base 9: mod_base = OTHER; note = 2'-deoxyguanosine-3'-phosphorothioate
  modified_base 10: mod_base = OTHER; note = 2'-deoxyadenosine-3'-phosphorothioate
  modified_base 11: mod_base = OTHER; note = 2'-deoxythymidine-3'-phosphorothioate
  modified_base 12: mod_base = OTHER; note = 2'-deoxyguanosine-3'-phosphorothioate
  modified_base 13: mod_base = OTHER; note = 2'-deoxyguanosine-3'-phosphorothioate
  modified_base 14: mod_base = OTHER; note = 2'-deoxyguanosine-3'-phosphorothioate
  modified_base 15: mod_base = OTHER; note = 2'-deoxythymidine-3'-phosphorothioate
  modified_base 16: mod_base = OTHER; note = 2'-O-methylcytidine-3'-phosphorothioate
  modified_base 17: mod_base = OTHER; note = 2'-O-methyluridine-3'-phosphorothioate
  modified_base 18: mod_base = OTHER; note = 2'-O-methyladenosine-3'-phosphorothioate
  modified_base 19: mod_base = OTHER; note = 2'-O-methyluridine-3'-phosphorothioate
  modified_base 20: mod_base = OTHER; note = 2'-O-methyluridine-3'-phosphate
  misc_feature 1..5: note = RNA
  misc_feature 6..15: note = DNA
  misc_feature 16..20: note = RNA
agctgatagatgggtctatt

SEQ ID NO: 4215 - DNA, 20 bp, synthetic construct
  source 1..20: mol_type = other DNA; note = Description of Artificial Sequence: Synthetic oligonucleotide; note = Description of Combined DNA/RNA Molecule: Synthetic oligonucleotide
  modified_base 1: mod_base = OTHER; note = 2'-O-methylguanosine-3'-phosphorothioate
  modified_base 2: mod_base = OTHER; note = 2'-O-methyladenosine-3'-phosphorothioate
  modified_base 3: mod_base = OTHER; note = 2'-O-methyluridine-3'-phosphorothioate
  modified_base 4: mod_base = OTHER; note = 2'-O-methyladenosine-3'-phosphorothioate
  modified_base 5: mod_base = OTHER; note = 2'-O-methyluridine-3'-phosphorothioate
  modified_base 6: mod_base = OTHER; note = 5'-methyl-deoxycytidine-3'-phosphorothioate
  modified_base 7: mod_base = OTHER; note = 2'-deoxythymidine-3'-phosphorothioate
  modified_base 8: mod_base = OTHER; note = 2'-deoxythymidine-3'-phosphorothioate
  modified_base 9: mod_base = OTHER; note = 5'-methyl-deoxycytidine-3'-phosphorothioate
  modified_base 10: mod_base = OTHER; note = 5'-methyl-deoxycytidine-3'-phosphorothioate
  modified_base 11: mod_base = OTHER; note = 5'-methyl-deoxycytidine-3'-phosphorothioate
  modified_base 12: mod_base = OTHER; note = 2'-deoxyadenosine-3'-phosphorothioate
  modified_base 13: mod_base = OTHER; note = 2'-deoxyguanosine-3'-phosphorothioate
  modified_base 14: mod_base = OTHER; note = 5'-methyl-deoxycytidine-3'-phosphorothioate
  modified_base 15: mod_base = OTHER; note = 2'-deoxythymidine-3'-phosphorothioate
  modified_base 16: mod_base = OTHER; note = 2'-O-methylguanosine-3'-phosphorothioate
  modified_base 17: mod_base = OTHER; note = 2'-O-methyladenosine-3'-phosphorothioate
  modified_base 18: mod_base = OTHER; note = 2'-O-methyluridine-3'-phosphorothioate
  modified_base 19: mod_base = OTHER; note = 2'-O-methyladenosine-3'-phosphorothioate
  modified_base 20: mod_base = OTHER; note = 2'-O-methylguanosine-3'-phosphate
  misc_feature 1..5: note = RNA
  misc_feature 6..15: note = DNA
  misc_feature 16..20: note = RNA
gatatcttcccagctgatag

SEQ ID NO: 4216 - DNA, 20 bp, synthetic construct
  source 1..20: mol_type = other DNA; note = Description of Artificial Sequence: Synthetic oligonucleotide; note = Description of Combined DNA/RNA Molecule: Synthetic oligonucleotide
  modified_base 1: mod_base = OTHER; note = 2'-O-methylcytidine-3'-phosphorothioate
  modified_base 2: mod_base = OTHER; note = 2'-O-methyluridine-3'-phosphorothioate
  modified_base 3: mod_base = OTHER; note = 2'-O-methylcytidine-3'-phosphorothioate
  modified_base 4: mod_base = OTHER; note = 2'-O-methyladenosine-3'-phosphorothioate
  modified_base 5: mod_base = OTHER; note = 2'-O-methylguanosine-3'-phosphorothioate
  modified_base 6: mod_base = OTHER; note = 5'-methyl-deoxycytidine-3'-phosphorothioate
  modified_base 7: mod_base = OTHER; note = 5'-methyl-deoxycytidine-3'-phosphorothioate
  modified_base 8: mod_base = OTHER; note = 2'-deoxyadenosine-3'-phosphorothioate
  modified_base 9: mod_base = OTHER; note = 2'-deoxythymidine-3'-phosphorothioate
  modified_base 10: mod_base = OTHER; note = 2'-deoxythymidine-3'-phosphorothioate
  modified_base 11: mod_base = OTHER; note = 2'-deoxythymidine-3'-phosphorothioate
  modified_base 12: mod_base = OTHER; note = 2'-deoxyguanosine-3'-phosphorothioate
  modified_base 13: mod_base = OTHER; note = 2'-deoxyadenosine-3'-phosphorothioate
  modified_base 14: mod_base = OTHER; note = 2'-deoxythymidine-3'-phosphorothioate
  modified_base 15: mod_base = OTHER; note = 2'-deoxyadenosine-3'-phosphorothioate
  modified_base 16: mod_base = OTHER; note = 2'-O-methyluridine-3'-phosphorothioate
  modified_base 17: mod_base = OTHER; note = 2'-O-methylcytidine-3'-phosphorothioate
  modified_base 18: mod_base = OTHER; note = 2'-O-methyluridine-3'-phosphorothioate
  modified_base 19: mod_base = OTHER; note = 2'-O-methyluridine-3'-phosphorothioate
  modified_base 20: mod_base = OTHER; note = 2'-O-methylcytidine-3'-phosphate
  misc_feature 1..5: note = RNA
  misc_feature 6..15: note = DNA
  misc_feature 16..20: note = RNA
ctcagccatttgatatcttc

SEQ ID NO: 4217 - DNA, 20 bp, synthetic construct
  source 1..20: mol_type = other DNA; note = Description of Artificial Sequence: Synthetic oligonucleotide; note = Description of Combined DNA/RNA Molecule: Synthetic oligonucleotide
  modified_base 1: mod_base = OTHER; note = 2'-O-methylguanosine-3'-phosphorothioate
  modified_base 2: mod_base = OTHER; note = 2'-O-methyladenosine-3'-phosphorothioate
  modified_base 3: mod_base = OTHER; note = 2'-O-methyluridine-3'-phosphorothioate
  modified_base 4: mod_base = OTHER; note = 2'-O-methylguanosine-3'-phosphorothioate
  modified_base 5: mod_base = OTHER; note = 2'-O-methyluridine-3'-phosphorothioate
  modified_base 6: mod_base = OTHER; note = 5'-methyl-deoxycytidine-3'-phosphorothioate
  modified_base 7: mod_base = OTHER; note = 2'-deoxyadenosine-3'-phosphorothioate
  modified_base 8: mod_base = OTHER; note = 2'-deoxyguanosine-3'-phosphorothioate
  modified_base 9: mod_base = OTHER; note = 2'-deoxythymidine-3'-phosphorothioate
  modified_base 10: mod_base = OTHER; note = 5'-methyl-deoxycytidine-3'-phosphorothioate
  modified_base 11: mod_base = OTHER; note = 2'-deoxythymidine-3'-phosphorothioate
  modified_base 12: mod_base = OTHER; note = 2'-deoxythymidine-3'-phosphorothioate
  modified_base 13: mod_base = OTHER; note = 5'-methyl-deoxycytidine-3'-phosphorothioate
  modified_base 14: mod_base = OTHER; note = 2'-deoxythymidine-3'-phosphorothioate
  modified_base 15: mod_base = OTHER; note = 5'-methyl-deoxycytidine-3'-phosphorothioate
  modified_base 16: mod_base = OTHER; note = 2'-O-methyladenosine-3'-phosphorothioate
  modified_base 17: mod_base = OTHER; note = 2'-O-methylguanosine-3'-phosphorothioate
  modified_base 18: mod_base = OTHER; note = 2'-O-methylcytidine-3'-phosphorothioate
  modified_base 19: mod_base = OTHER; note = 2'-O-methylcytidine-3'-phosphorothioate
  modified_base 20: mod_base = OTHER; note = 2'-O-methyladenosine-3'-phosphate
  misc_feature 1..5: note = RNA
  misc_feature 6..15: note = DNA
  misc_feature 16..20: note = RNA
gatgtcagtcttctcagcca

SEQ ID NO: 4218 - DNA, 20 bp, synthetic construct
  source 1..20: mol_type = other DNA; note = Description of Artificial Sequence: Synthetic oligonucleotide; note = Description of Combined DNA/RNA Molecule: Synthetic oligonucleotide
  modified_base 1: mod_base = OTHER; note = 2'-O-methylcytidine-3'-phosphorothioate
  modified_base 2: mod_base = OTHER; note = 2'-O-methyladenosine-3'-phosphorothioate
  modified_base 3: mod_base = OTHER; note = 2'-O-methyladenosine-3'-phosphorothioate
  modified_base 4: mod_base = OTHER; note = 2'-O-methyluridine-3'-phosphorothioate
  modified_base 5: mod_base = OTHER; note = 2'-O-methyluridine-3'-phosphorothioate
  modified_base 6: mod_base = OTHER; note = 2'-deoxyguanosine-3'-phosphorothioate
  modified_base 7: mod_base = OTHER; note = 2'-deoxyguanosine-3'-phosphorothioate
  modified_base 8: mod_base = OTHER; note = 5'-methyl-deoxycytidine-3'-phosphorothioate
  modified_base 9: mod_base = OTHER; note = 2'-deoxyadenosine-3'-phosphorothioate
  modified_base 10: mod_base = OTHER; note = 2'-deoxyadenosine-3'-phosphorothioate
  modified_base 11: mod_base = OTHER; note = 2'-deoxythymidine-3'-phosphorothioate
  modified_base 12: mod_base = OTHER; note = 2'-deoxyguanosine-3'-phosphorothioate
  modified_base 13: mod_base = OTHER; note = 2'-deoxyadenosine-3'-phosphorothioate
  modified_base 14: mod_base = OTHER; note = 2'-deoxythymidine-3'-phosphorothioate
  modified_base 15: mod_base = OTHER; note = 2'-deoxyguanosine-3'-phosphorothioate
  modified_base 16: mod_base = OTHER; note = 2'-O-methyluridine-3'-phosphorothioate
  modified_base 17: mod_base = OTHER; note = 2'-O-methylcytidine-3'-phosphorothioate
  modified_base 18: mod_base = OTHER; note = 2'-O-methyladenosine-3'-phosphorothioate
  modified_base 19: mod_base = OTHER; note = 2'-O-methylguanosine-3'-phosphorothioate
  modified_base 20: mod_base = OTHER; note = 2'-O-methyluridine-3'-phosphate
  misc_feature 1..5: note = RNA
  misc_feature 6..15: note = DNA
  misc_feature 16..20: note = RNA
caattggcaatgatgtcagt

SEQ ID NO: 4219 - DNA, 20 bp, synthetic construct
  source 1..20: mol_type = other DNA; note = Description of Artificial Sequence: Synthetic oligonucleotide; note = Description of Combined DNA/RNA Molecule: Synthetic oligonucleotide
  modified_base 1: mod_base = OTHER; note = 2'-O-methylcytidine-3'-phosphorothioate
  modified_base 2: mod_base = OTHER; note = 2'-O-methylcytidine-3'-phosphorothioate
  modified_base 3: mod_base = OTHER; note = 2'-O-methylcytidine-3'-phosphorothioate
  modified_base 4: mod_base = OTHER; note = 2'-O-methyluridine-3'-phosphorothioate
  modified_base 5: mod_base = OTHER; note = 2'-O-methyluridine-3'-phosphorothioate
  modified_base 6: mod_base = OTHER; note = 2'-deoxythymidine-3'-phosphorothioate
  modified_base 7: mod_base = OTHER; note = 2'-deoxyguanosine-3'-phosphorothioate
  modified_base 8: mod_base = OTHER; note = 5'-methyl-deoxycytidine-3'-phosphorothioate
  modified_base 9: mod_base = OTHER; note = 2'-deoxyadenosine-3'-phosphorothioate
  modified_base 10: mod_base = OTHER; note = 2'-deoxyadenosine-3'-phosphorothioate
  modified_base 11: mod_base = OTHER; note = 5'-methyl-deoxycytidine-3'-phosphorothioate
  modified_base 12: mod_base = OTHER; note = 2'-deoxyadenosine-3'-phosphorothioate
  modified_base 13: mod_base = OTHER; note = 2'-deoxyadenosine-3'-phosphorothioate
  modified_base 14: mod_base = OTHER; note = 2'-deoxythymidine-3'-phosphorothioate
  modified_base 15: mod_base = OTHER; note = 2'-deoxythymidine-3'-phosphorothioate
  modified_base 16: mod_base = OTHER; note = 2'-O-methylguanosine-3'-phosphorothioate
  modified_base 17: mod_base = OTHER; note = 2'-O-methylguanosine-3'-phosphorothioate
  modified_base 18: mod_base = OTHER; note = 2'-O-methylcytidine-3'-phosphorothioate
  modified_base 19: mod_base = OTHER; note = 2'-O-methyladenosine-3'-phosphorothioate
  modified_base 20: mod_base = OTHER; note = 2'-O-methyladenosine-3'-phosphate
  misc_feature 1..5: note = RNA
  misc_feature 6..15: note = DNA
  misc_feature 16..20: note = RNA
ccctttgcaacaattggcaa

SEQ ID NO: 4220 - DNA, 20 bp, synthetic construct
  source 1..20: mol_type = other DNA; note = Description of Artificial Sequence: Synthetic oligonucleotide; note = Description of Combined DNA/RNA Molecule: Synthetic oligonucleotide
  modified_base 1: mod_base = OTHER; note = 2'-O-methylcytidine-3'-phosphorothioate
  modified_base 2: mod_base = OTHER; note = 2'-O-methyluridine-3'-phosphorothioate
  modified_base 3: mod_base = OTHER; note = 2'-O-methylcytidine-3'-phosphorothioate
  modified_base 4: mod_base = OTHER; note = 2'-O-methyluridine-3'-phosphorothioate
  modified_base 5: mod_base = OTHER; note = 2'-O-methylcytidine-3'-phosphorothioate
  modified_base 6: mod_base = OTHER; note = 2'-deoxyadenosine-3'-phosphorothioate
  modified_base 7: mod_base = OTHER; note = 2'-deoxyadenosine-3'-phosphorothioate
  modified_base 8: mod_base = OTHER; note = 2'-deoxyadenosine-3'-phosphorothioate
  modified_base 9: mod_base = OTHER; note = 2'-deoxyadenosine-3'-phosphorothioate
  modified_base 10: mod_base = OTHER; note = 2'-deoxythymidine-3'-phosphorothioate
  modified_base 11: mod_base = OTHER; note = 2'-deoxyguanosine-3'-phosphorothioate
  modified_base 12: mod_base = OTHER; note = 5'-methyl-deoxycytidine-3'-phosphorothioate
  modified_base 13: mod_base = OTHER; note = 5'-methyl-deoxycytidine-3'-phosphorothioate
  modified_base 14: mod_base = OTHER; note = 5'-methyl-deoxycytidine-3'-phosphorothioate
  modified_base 15: mod_base = OTHER; note = 2'-deoxythymidine-3'-phosphorothioate
  modified_base 16: mod_base = OTHER; note = 2'-O-methyluridine-3'-phosphorothioate
  modified_base 17: mod_base = OTHER; note = 2'-O-methyluridine-3'-phosphorothioate
  modified_base 18: mod_base = OTHER; note = 2'-O-methylguanosine-3'-phosphorothioate
  modified_base 19: mod_base = OTHER; note = 2'-O-methylcytidine-3'-phosphorothioate
  modified_base 20: mod_base = OTHER; note = 2'-O-methyladenosine-3'-phosphate
  misc_feature 1..5: note = RNA
  misc_feature 6..15: note = DNA
  misc_feature 16..20: note = RNA
ctctcaaaatgccctttgca

SEQ ID NO: 4221 - DNA, 20 bp, synthetic construct
  source 1..20: mol_type = other DNA; note = Description of Artificial Sequence: Synthetic oligonucleotide; note = Description of Combined DNA/RNA Molecule: Synthetic oligonucleotide
  modified_base 1: mod_base = OTHER; note = 2'-O-methylguanosine-3'-phosphorothioate
  modified_base 2: mod_base = OTHER; note = 2'-O-methylguanosine-3'-phosphorothioate
  modified_base 3: mod_base = OTHER; note = 2'-O-methylcytidine-3'-phosphorothioate
  modified_base 4: mod_base = OTHER; note = 2'-O-methyladenosine-3'-phosphorothioate
  modified_base 5: mod_base = OTHER; note = 2'-O-methyluridine-3'-phosphorothioate
  modified_base 6: mod_base = OTHER; note = 5'-methyl-deoxycytidine-3'-phosphorothioate
  modified_base 7: mod_base = OTHER; note = 2'-deoxyadenosine-3'-phosphorothioate
  modified_base 8: mod_base = OTHER; note = 2'-deoxythymidine-3'-phosphorothioate
  modified_base 9: mod_base = OTHER; note = 5'-methyl-deoxycytidine-3'-phosphorothioate
  modified_base 10: mod_base = OTHER; note = 2'-deoxyadenosine-3'-phosphorothioate
  modified_base 11: mod_base = OTHER; note = 5'-methyl-deoxycytidine-3'-phosphorothioate
  modified_base 12: mod_base = OTHER; note = 5'-methyl-deoxycytidine-3'-phosphorothioate
  modified_base 13: mod_base = OTHER; note = 2'-deoxythymidine-3'-phosphorothioate
  modified_base 14: mod_base = OTHER; note = 5'-methyl-deoxycytidine-3'-phosphorothioate
  modified_base 15: mod_base = OTHER; note = 2'-deoxythymidine-3'-phosphorothioate
  modified_base 16: mod_base = OTHER; note = 2'-O-methylcytidine-3'-phosphorothioate
  modified_base 17: mod_base = OTHER; note = 2'-O-methyladenosine-3'-phosphorothioate
  modified_base 18: mod_base = OTHER; note = 2'-O-methyladenosine-3'-phosphorothioate
  modified_base 19: mod_base = OTHER; note = 2'-O-methyladenosine-3'-phosphorothioate
  modified_base 20: mod_base = OTHER; note = 2'-O-methyladenosine-3'-phosphate
  misc_feature 1..5: note = RNA
  misc_feature 6..15: note = DNA
  misc_feature 16..20: note = RNA
ggcatcatcacctctcaaaa

SEQ ID NO: 4222 - DNA, 20 bp, synthetic construct
  source 1..20: mol_type = other DNA; note = Description of Artificial Sequence: Synthetic oligonucleotide; note = Description of Combined DNA/RNA Molecule: Synthetic oligonucleotide
  modified_base 1: mod_base = OTHER; note = 2'-O-methyladenosine-3'-phosphorothioate
  modified_base 2: mod_base = OTHER; note = 2'-O-methyladenosine-3'-phosphorothioate
  modified_base 3: mod_base = OTHER; note = 2'-O-methylcytidine-3'-phosphorothioate
  modified_base 4: mod_base = OTHER; note = 2'-O-methyladenosine-3'-phosphorothioate
  modified_base 5: mod_base = OTHER; note = 2'-O-methylguanosine-3'-phosphorothioate
  modified_base 6: mod_base = OTHER; note = 5'-methyl-deoxycytidine-3'-phosphorothioate
  modified_base 7: mod_base = OTHER; note = 5'-methyl-deoxycytidine-3'-phosphorothioate
  modified_base 8: mod_base = OTHER; note = 2'-deoxythymidine-3'-phosphorothioate
  modified_base 9: mod_base = OTHER; note = 5'-methyl-deoxycytidine-3'-phosphorothioate
  modified_base 10: mod_base = OTHER; note = 5'-methyl-deoxycytidine-3'-phosphorothioate
  modified_base 11: mod_base = OTHER; note = 5'-methyl-deoxycytidine-3'-phosphorothioate
  modified_base 12: mod_base = OTHER; note = 2'-deoxythymidine-3'-phosphorothioate
  modified_base 13: mod_base = OTHER; note = 2'-deoxyguanosine-3'-phosphorothioate
  modified_base 14: mod_base = OTHER; note = 2'-deoxyguanosine-3'-phosphorothioate
  modified_base 15: mod_base = OTHER; note = 5'-methyl-deoxycytidine-3'-phosphorothioate
  modified_base 16: mod_base = OTHER; note = 2'-O-methyladenosine-3'-phosphorothioate
  modified_base 17: mod_base = OTHER; note = 2'-O-methyluridine-3'-phosphorothioate
  modified_base 18: mod_base = OTHER; note = 2'-O-methylcytidine-3'-phosphorothioate
  modified_base 19: mod_base = OTHER; note = 2'-O-methyladenosine-3'-phosphorothioate
  modified_base 20: mod_base = OTHER; note = 2'-O-methyluridine-3'-phosphate
  misc_feature 1..5: note = RNA
  misc_feature 6..15: note = DNA
  misc_feature 16..20: note = RNA
aacagcctccctggcatcat

SEQ ID NO: 4223 - DNA, 20 bp, synthetic construct
  source 1..20: mol_type = other DNA; note = Description of Artificial Sequence: Synthetic oligonucleotide; note = Description of Combined DNA/RNA Molecule: Synthetic oligonucleotide
  modified_base 1: mod_base = OTHER; note = 2'-O-methyladenosine-3'-phosphorothioate
  modified_base 2: mod_base = OTHER; note = 2'-O-methyladenosine-3'-phosphorothioate
  modified_base 3: mod_base = OTHER; note = 2'-O-methylguanosine-3'-phosphorothioate
  modified_base 4: mod_base = OTHER; note = 2'-O-methylcytidine-3'-phosphorothioate
  modified_base 5: mod_base = OTHER; note = 2'-O-methylcytidine-3'-phosphorothioate
  modified_base 6: mod_base = OTHER; note = 2'-deoxyadenosine-3'-phosphorothioate
  modified_base 7: mod_base = OTHER; note = 2'-deoxythymidine-3'-phosphorothioate
  modified_base 8: mod_base = OTHER; note = 2'-deoxyguanosine-3'-phosphorothioate
  modified_base 9: mod_base = OTHER; note = 2'-deoxythymidine-3'-phosphorothioate
  modified_base 10: mod_base = OTHER; note = 2'-deoxythymidine-3'-phosphorothioate
  modified_base 11: mod_base = OTHER; note = 2'-deoxythymidine-3'-phosphorothioate
  modified_base 12: mod_base = OTHER; note = 2'-deoxyadenosine-3'-phosphorothioate
  modified_base 13: mod_base = OTHER; note = 2'-deoxyadenosine-3'-phosphorothioate
  modified_base 14: mod_base = OTHER; note = 5'-methyl-deoxycytidine-3'-phosphorothioate
  modified_base 15: mod_base = OTHER; note = 2'-deoxyadenosine-3'-phosphorothioate
  modified_base 16: mod_base = OTHER; note = 2'-O-methylguanosine-3'-phosphorothioate
  modified_base 17: mod_base = OTHER; note = 2'-O-methylcytidine-3'-phosphorothioate
  modified_base 18: mod_base = OTHER; note = 2'-O-methylcytidine-3'-phosphorothioate
  modified_base 19: mod_base = OTHER; note = 2'-O-methyluridine-3'-phosphorothioate
  modified_base 20: mod_base = OTHER; note = 2'-O-methylcytidine-3'-phosphate
  misc_feature 1..5: note = RNA
  misc_feature 6..15: note = DNA
  misc_feature 16..20: note = RNA
aagccatgtttaacagcctc

SEQ ID NO: 4224 - DNA, 20 bp, synthetic construct
  source 1..20: mol_type = other DNA; note = Description of Artificial Sequence: Synthetic oligonucleotide; note = Description of Combined DNA/RNA Molecule: Synthetic oligonucleotide
  modified_base 1: mod_base = OTHER; note = 2'-O-methyladenosine-3'-phosphorothioate
  modified_base 2: mod_base = OTHER; note = 2'-O-methyladenosine-3'-phosphorothioate
  modified_base 3: mod_base = OTHER; note = 2'-O-methylguanosine-3'-phosphorothioate
  modified_base 4: mod_base = OTHER; note = 2'-O-methyladenosine-3'-phosphorothioate
  modified_base 5: mod_base = OTHER; note = 2'-O-methyluridine-3'-phosphorothioate
  modified_base 6: mod_base = OTHER; note = 5'-methyl-deoxycytidine-3'-phosphorothioate
  modified_base 7: mod_base = OTHER; note = 5'-methyl-deoxycytidine-3'-phosphorothioate
  modified_base 8: mod_base = OTHER; note = 5'-methyl-deoxycytidine-3'-phosphorothioate
  modified_base 9: mod_base = OTHER; note = 2'-deoxyadenosine-3'-phosphorothioate
  modified_base 10: mod_base = OTHER; note = 2'-deoxythymidine-3'-phosphorothioate
  modified_base 11: mod_base = OTHER; note = 2'-deoxythymidine-3'-phosphorothioate
  modified_base 12: mod_base = OTHER; note = 5'-methyl-deoxycytidine-3'-phosphorothioate
  modified_base 13: mod_base = OTHER; note = 2'-deoxyadenosine-3'-phosphorothioate
  modified_base 14: mod_base = OTHER; note = 2'-deoxyadenosine-3'-phosphorothioate
  modified_base 15: mod_base = OTHER; note = 2'-deoxyguanosine-3'-phosphorothioate
  modified_base 16: mod_base = OTHER; note = 2'-O-methylcytidine-3'-phosphorothioate
  modified_base 17: mod_base = OTHER; note = 2'-O-methylcytidine-3'-phosphorothioate
  modified_base 18: mod_base = OTHER; note = 2'-O-methyladenosine-3'-phosphorothioate
  modified_base 19: mod_base = OTHER; note = 2'-O-methyluridine-3'-phosphorothioate
  modified_base 20: mod_base = OTHER; note = 2'-O-methylguanosine-3'-phosphate
  misc_feature 1..5: note = RNA
  misc_feature 6..15: note = DNA
  misc_feature 16..20: note = RNA
aagatcccattcaagccatg

SEQ ID NO: 4225 - DNA, 20 bp, synthetic construct
  source 1..20: mol_type = other DNA; note = Description of Artificial Sequence: Synthetic oligonucleotide; note = Description of Combined DNA/RNA Molecule: Synthetic oligonucleotide
  modified_base 1: mod_base = OTHER; note = 2'-O-methyluridine-3'-phosphorothioate
  modified_base 2: mod_base = OTHER; note = 2'-O-methyluridine-3'-phosphorothioate
  modified_base 3: mod_base = OTHER; note = 2'-O-methylcytidine-3'-phosphorothioate
  modified_base 4: mod_base = OTHER; note = 2'-O-methylguanosine-3'-phosphorothioate
  modified_base 5: mod_base = OTHER; note = 2'-O-methyladenosine-3'-phosphorothioate
  modified_base 6: mod_base = OTHER; note = 5'-methyl-deoxycytidine-3'-phosphorothioate
  modified_base 7: mod_base = OTHER; note = 2'-deoxyadenosine-3'-phosphorothioate
  modified_base 8: mod_base = OTHER; note = 5'-methyl-deoxycytidine-3'-phosphorothioate
  modified_base 9: mod_base = OTHER; note = 5'-methyl-deoxycytidine-3'-phosphorothioate
  modified_base 10: mod_base = OTHER; note = 2'-deoxyadenosine-3'-phosphorothioate
  modified_base 11: mod_base = OTHER; note = 2'-deoxyadenosine-3'-phosphorothioate
  modified_base 12: mod_base = OTHER; note = 2'-deoxyguanosine-3'-phosphorothioate
  modified_base 13: mod_base = OTHER; note = 2'-deoxyadenosine-3'-phosphorothioate
  modified_base 14: mod_base = OTHER; note = 2'-deoxythymidine-3'-phosphorothioate
  modified_base 15: mod_base = OTHER; note = 5'-methyl-deoxycytidine-3'-phosphorothioate
  modified_base 16: mod_base = OTHER; note = 2'-O-methylcytidine-3'-phosphorothioate
  modified_base 17: mod_base = OTHER; note = 2'-O-methylcytidine-3'-phosphorothioate
  modified_base 18: mod_base = OTHER; note = 2'-O-methyladenosine-3'-phosphorothioate
  modified_base 19: mod_base = OTHER; note = 2'-O-methyluridine-3'-phosphorothioate
  modified_base 20: mod_base = OTHER; note = 2'-O-methyluridine-3'-phosphate
  misc_feature 1..5: note = RNA
  misc_feature 6..15: note = DNA
  misc_feature 16..20: note = RNA
ttcgacaccaagatcccatt

SEQ ID NO: 4226 - DNA, 20 bp, synthetic construct
  source 1..20: mol_type = other DNA; note = Description of Artificial Sequence: Synthetic oligonucleotide; note = Description of Combined DNA/RNA Molecule: Synthetic oligonucleotide
  modified_base 1: mod_base = OTHER; note = 2'-O-methyluridine-3'-phosphorothioate
  modified_base 2: mod_base = OTHER; note = 2'-O-methylcytidine-3'-phosphorothioate
  modified_base 3: mod_base = OTHER; note = 2'-O-methylguanosine-3'-phosphorothioate
  modified_base 4: mod_base = OTHER; note = 2'-O-methyladenosine-3'-phosphorothioate
  modified_base 5: mod_base = OTHER; note = 2'-O-methylguanosine-3'-phosphorothioate
  modified_base 6: mod_base = OTHER; note = 5'-methyl-deoxycytidine-3'-phosphorothioate
  modified_base 7: mod_base = OTHER; note = 5'-methyl-deoxycytidine-3'-phosphorothioate
  modified_base 8: mod_base = OTHER; note = 5'-methyl-deoxycytidine-3'-phosphorothioate
  modified_base 9: mod_base = OTHER; note = 5'-methyl-deoxycytidine-3'-phosphorothioate
  modified_base 10: mod_base = OTHER; note = 2'-deoxyadenosine-3'-phosphorothioate
  modified_base 11: mod_base = OTHER; note = 2'-deoxythymidine-3'-phosphorothioate
  modified_base 12: mod_base = OTHER; note = 2'-deoxyguanosine-3'-phosphorothioate
  modified_base 13: mod_base = OTHER; note = 2'-deoxyadenosine-3'-phosphorothioate
  modified_base 14: mod_base = OTHER; note = 2'-deoxythymidine-3'-phosphorothioate
  modified_base 15: mod_base = OTHER; note = 2'-deoxythymidine-3'-phosphorothioate
  modified_base 16: mod_base = OTHER; note = 2'-O-methylcytidine-3'-phosphorothioate
  modified_base 17: mod_base = OTHER; note = 2'-O-methylguanosine-3'-phosphorothioate
  modified_base 18: mod_base = OTHER; note = 2'-O-methyladenosine-3'-phosphorothioate
  modified_base 19: mod_base = OTHER; note = 2'-O-methylcytidine-3'-phosphorothioate
  modified_base 20: mod_base = OTHER; note = 2'-O-methyladenosine-3'-phosphate
  misc_feature 1..5: note = RNA
  misc_feature 6..15: note = DNA
  misc_feature 16..20: note = RNA
tcgagccccatgattcgaca

SEQ ID NO: 4227 - DNA, 20 bp, synthetic construct
  source 1..20: mol_type = other DNA; note = Description of Artificial Sequence: Synthetic oligonucleotide; note = Description of Combined DNA/RNA Molecule: Synthetic oligonucleotide
  modified_base 1: mod_base = OTHER; note = 2'-O-methyladenosine-3'-phosphorothioate
  modified_base 2: mod_base = OTHER; note = 2'-O-methyluridine-3'-phosphorothioate
  modified_base 3: mod_base = OTHER; note = 2'-O-methylcytidine-3'-phosphorothioate
  modified_base 4: mod_base = OTHER; note = 2'-O-methylguanosine-3'-phosphorothioate
  modified_base 5: mod_base = OTHER; note = 2'-O-methyladenosine-3'-phosphorothioate
  modified_base 6: mod_base = OTHER; note = 2'-deoxyguanosine-3'-phosphorothioate
  modified_base 7: mod_base = OTHER; note = 2'-deoxythymidine-3'-phosphorothioate
  modified_base 8: mod_base = OTHER; note = 2'-deoxythymidine-3'-phosphorothioate
  modified_base 9: mod_base = OTHER; note = 2'-deoxyguanosine-3'-phosphorothioate
  modified_base 10: mod_base = OTHER; note = 2'-deoxythymidine-3'-phosphorothioate
  modified_base 11: mod_base = OTHER; note = 5'-methyl-deoxycytidine-3'-phosphorothioate
  modified_base 12: mod_base = OTHER; note = 2'-deoxyguanosine-3'-phosphorothioate
  modified_base 13: mod_base = OTHER; note = 2'-deoxyadenosine-3'-phosphorothioate
  modified_base 14: mod_base = OTHER; note = 2'-deoxyguanosine-3'-phosphorothioate
  modified_base 15: mod_base = OTHER; note = 5'-methyl-deoxycytidine-3'-phosphorothioate
  modified_base 16: mod_base = OTHER; note = 2'-O-methylcytidine-3'-phosphorothioate
  modified_base 17: mod_base = OTHER; note = 2'-O-methylcytidine-3'-phosphorothioate
  modified_base 18: mod_base = OTHER; note = 2'-O-methylcytidine-3'-phosphorothioate
  modified_base 19: mod_base = OTHER; note = 2'-O-methyladenosine-3'-phosphorothioate
  modified_base 20: mod_base = OTHER; note = 2'-O-methyluridine-3'-phosphate
  misc_feature 1..5: note = RNA
  misc_feature 6..15: note = DNA
  misc_feature 16..20: note = RNA
atcgagttgtcgagccccat

SEQ ID NO: 4228 - DNA, 20 bp, synthetic construct
  source 1..20: mol_type = other DNA; note = Description of Artificial Sequence: Synthetic oligonucleotide; note = Description of Combined DNA/RNA Molecule: Synthetic oligonucleotide
  modified_base 1: mod_base = OTHER; note = 2'-O-methylguanosine-3'-phosphorothioate
  modified_base 2: mod_base = OTHER; note = 2'-O-methylguanosine-3'-phosphorothioate
  modified_base 3: mod_base = OTHER; note = 2'-O-methylcytidine-3'-phosphorothioate
  modified_base 4: mod_base = OTHER; note = 2'-O-methyluridine-3'-phosphorothioate
  modified_base 5: mod_base = OTHER; note = 2'-O-methylguanosine-3'-phosphorothioate
  modified_base 6: mod_base = OTHER; note = 2'-deoxyguanosine-3'-phosphorothioate
  modified_base 7: mod_base = OTHER; note = 5'-methyl-deoxycytidine-3'-phosphorothioate
  modified_base 8: mod_base = OTHER; note = 2'-deoxyadenosine-3'-phosphorothioate
  modified_base 9: mod_base = OTHER; note = 5'-methyl-deoxycytidine-3'-phosphorothioate
  modified_base 10: mod_base = OTHER; note = 5'-methyl-deoxycytidine-3'-phosphorothioate
  modified_base 11: mod_base = OTHER; note = 5'-methyl-deoxycytidine-3'-phosphorothioate
  modified_base 12: mod_base = OTHER; note = 5'-methyl-deoxycytidine-3'-phosphorothioate
  modified_base 13: mod_base = OTHER; note = 2'-deoxyadenosine-3'-phosphorothioate
  modified_base 14: mod_base = OTHER; note = 2'-deoxythymidine-3'-phosphorothioate
  modified_base 15: mod_base = OTHER; note = 5'-methyl-deoxycytidine-3'-phosphorothioate
  modified_base 16: mod_base = OTHER; note = 2'-O-methylguanosine-3'-phosphorothioate
  modified_base 17: mod_base = OTHER; note = 2'-O-methyladenosine-3'-phosphorothioate
  modified_base 18: mod_base = OTHER; note = 2'-O-methylguanosine-3'-phosphorothioate
  modified_base 19: mod_base = OTHER; note = 2'-O-methyluridine-3'-phosphorothioate
  modified_base 20: mod_base = OTHER; note = 2'-O-methyluridine-3'-phosphate
  misc_feature 1..5: note = RNA
  misc_feature 6..15: note = DNA
  misc_feature 16..20: note = RNA
ggctggcaccccatcgagtt

SEQ ID NO: 4229 - DNA, 20 bp, synthetic construct
  source 1..20: mol_type = other DNA; note = Description of Artificial Sequence: Synthetic oligonucleotide; note = Description of Combined DNA/RNA Molecule: Synthetic oligonucleotide
  modified_base 1: mod_base = OTHER; note = 2'-O-methyladenosine-3'-phosphorothioate
  modified_base 2: mod_base = OTHER; note = 2'-O-methyladenosine-3'-phosphorothioate
  modified_base 3: mod_base = OTHER; note = 2'-O-methylcytidine-3'-phosphorothioate
  modified_base 4: mod_base = OTHER; note = 2'-O-methyladenosine-3'-phosphorothioate
  modified_base 5: mod_base = OTHER; note = 2'-O-methyluridine-3'-phosphorothioate
  modified_base 6: mod_base = OTHER; note = 5'-methyl-deoxycytidine-3'-phosphorothioate
  modified_base 7: mod_base = OTHER; note = 2'-deoxyadenosine-3'-phosphorothioate
  modified_base 8: mod_base = OTHER; note = 2'-deoxyadenosine-3'-phosphorothioate
  modified_base 9: mod_base = OTHER; note = 2'-deoxythymidine-3'-phosphorothioate
  modified_base 10: mod_base = OTHER; note = 2'-deoxyadenosine-3'-phosphorothioate
  modified_base 11: mod_base = OTHER; note = 2'-deoxyguanosine-3'-phosphorothioate
  modified_base 12: mod_base = OTHER; note = 2'-deoxythymidine-3'-phosphorothioate
  modified_base 13: mod_base = OTHER; note = 2'-deoxyguanosine-3'-phosphorothioate
  modified_base 14: mod_base = OTHER; note = 2'-deoxyguanosine-3'-phosphorothioate
  modified_base 15: mod_base = OTHER; note = 5'-methyl-deoxycytidine-3'-phosphorothioate
  modified_base 16: mod_base = OTHER; note = 2'-O-methyluridine-3'-phosphorothioate
  modified_base 17: mod_base = OTHER; note = 2'-O-methylguanosine-3'-phosphorothioate
  modified_base 18: mod_base = OTHER; note = 2'-O-methylguanosine-3'-phosphorothioate
  modified_base 19: mod_base = OTHER; note = 2'-O-methylcytidine-3'-phosphorothioate
  modified_base 20: mod_base = OTHER; note = 2'-O-methyladenosine-3'-phosphate
  misc_feature 1..5: note = RNA
  misc_feature 6..15: note = DNA
  misc_feature 16..20: note = RNA
aacatcaatagtggctggca

SEQ ID NO: 4230 - DNA, 20 bp, synthetic construct
  source 1..20: mol_type = other DNA; note = Description of Artificial Sequence: Synthetic oligonucleotide; note = Description of Combined DNA/RNA Molecule: Synthetic oligonucleotide
  modified_base 1: mod_base = OTHER; note = 2'-O-methyladenosine-3'-phosphorothioate
  modified_base 2: mod_base = OTHER; note = 2'-O-methyluridine-3'-phosphorothioate
  modified_base 3: mod_base = OTHER; note = 2'-O-methyluridine-3'-phosphorothioate
  modified_base 4: mod_base = OTHER; note = 2'-O-methyluridine-3'-phosphorothioate
  modified_base 5: mod_base = OTHER; note = 2'-O-methylcytidine-3'-phosphorothioate
  modified_base 6: mod_base = OTHER; note = 2'-deoxythymidine-3'-phosphorothioate
  modified_base 7: mod_base = OTHER; note = 2'-deoxyguanosine-3'-phosphorothioate
  modified_base 8: mod_base = OTHER; note = 2'-deoxyguanosine-3'-phosphorothioate
  modified_base 9: mod_base = OTHER; note = 5'-methyl-deoxycytidine-3'-phosphorothioate
  modified_base 10: mod_base = OTHER; note = 2'-deoxyadenosine-3'-phosphorothioate
  modified_base 11: mod_base = OTHER; note = 2'-deoxyguanosine-3'-phosphorothioate
  modified_base 12: mod_base = OTHER; note = 2'-deoxyadenosine-3'-phosphorothioate
  modified_base 13: mod_base = OTHER; note = 2'-deoxyadenosine-3'-phosphorothioate
  modified_base 14: mod_base = OTHER; note = 5'-methyl-deoxycytidine-3'-phosphorothioate
  modified_base 15: mod_base = OTHER; note = 2'-deoxyadenosine-3'-phosphorothioate
  modified_base 16: mod_base = OTHER; note = 2'-O-methyluridine-3'-phosphorothioate
  modified_base 17: mod_base = OTHER; note = 2'-O-methylcytidine-3'-phosphorothioate
  modified_base 18: mod_base = OTHER; note = 2'-O-methyladenosine-3'-phosphorothioate
  modified_base 19: mod_base = OTHER; note = 2'-O-methyladenosine-3'-phosphorothioate
  modified_base 20: mod_base = OTHER; note = 2'-O-methyluridine-3'-phosphate
  misc_feature 1..5: note = RNA
  misc_feature 6..15: note = DNA
  misc_feature 16..20: note = RNA
atttctggcagaacatcaat

SEQ ID NO: 4231 - DNA, 20 bp, synthetic construct
  source 1..20: mol_type = other DNA; note = Description of Artificial Sequence: Synthetic oligonucleotide; note = Description of Combined DNA/RNA Molecule: Synthetic oligonucleotide
  modified_base 1: mod_base = OTHER; note = 2'-O-methyladenosine-3'-phosphorothioate
  modified_base 2: mod_base = OTHER; note = 2'-O-methylguanosine-3'-phosphorothioate
  modified_base 3: mod_base = OTHER; note = 2'-O-methylcytidine-3'-phosphorothioate
  modified_base 4: mod_base = OTHER; note = 2'-O-methylcytidine-3'-phosphorothioate
  modified_base 5: mod_base = OTHER; note = 2'-O-methyluridine-3'-phosphorothioate
  modified_base 6: mod_base = OTHER; note = 5'-methyl-deoxycytidine-3'-phosphorothioate
  modified_base 7: mod_base = OTHER; note = 5'-methyl-deoxycytidine-3'-phosphorothioate
  modified_base 8: mod_base = OTHER; note = 2'-deoxyadenosine-3'-phosphorothioate
  modified_base 9: mod_base = OTHER; note = 5'-methyl-deoxycytidine-3'-phosphorothioate
  modified_base 10: mod_base = OTHER; note = 2'-deoxyadenosine-3'-phosphorothioate
  modified_base 11: mod_base = OTHER; note = 2'-deoxyadenosine-3'-phosphorothioate
  modified_base 12: mod_base = OTHER; note = 2'-deoxythymidine-3'-phosphorothioate
  modified_base 13: mod_base = OTHER; note = 2'-deoxythymidine-3'-phosphorothioate
  modified_base 14: mod_base = OTHER; note = 2'-deoxythymidine-3'-phosphorothioate
  modified_base 15: mod_base = OTHER; note = 5'-methyl-deoxycytidine-3'-phosphorothioate
  modified_base 16: mod_base = OTHER; note = 2'-O-methyluridine-3'-phosphorothioate
  modified_base 17: mod_base = OTHER; note = 2'-O-methylguanosine-3'-phosphorothioate
  modified_base 18: mod_base = OTHER; note = 2'-O-methylguanosine-3'-phosphorothioate
  modified_base 19: mod_base = OTHER; note = 2'-O-methylcytidine-3'-phosphorothioate
  modified_base 20: mod_base = OTHER; note = 2'-O-methyladenosine-3'-phosphate
  misc_feature 1..5: note = RNA
  misc_feature 6..15: note = DNA
  misc_feature 16..20: note = RNA
agcctccacaatttctggca

SEQ ID NO: 4232 - DNA, 20 bp, synthetic construct
  source 1..20: mol_type = other DNA; note = Description of Artificial Sequence: Synthetic oligonucleotide; note = Description of Combined DNA/RNA Molecule: Synthetic oligonucleotide
  modified_base 1: mod_base = OTHER; note = 2'-O-methylcytidine-3'-phosphorothioate
  modified_base 2: mod_base = OTHER; note = 2'-O-methyluridine-3'-phosphorothioate
  modified_base 3: mod_base = OTHER; note = 2'-O-methyluridine-3'-phosphorothioate
  modified_base 4: mod_base = OTHER; note = 2'-O-methylcytidine-3'-phosphorothioate
  modified_base 5: mod_base = OTHER; note = 2'-O-methylcytidine-3'-phosphorothioate
  modified_base 6: mod_base = OTHER; note = 5'-methyl-deoxycytidine-3'-phosphorothioate
  modified_base 7: mod_base = OTHER; note = 2'-deoxythymidine-3'-phosphorothioate
  modified_base 8: mod_base = OTHER; note = 2'-deoxythymidine-3'-phosphorothioate
  modified_base 9: mod_base = OTHER; note = 5'-methyl-deoxycytidine-3'-phosphorothioate
  modified_base 10: mod_base = OTHER; note = 5'-methyl-deoxycytidine-3'-phosphorothioate
  modified_base 11: mod_base = OTHER; note = 2'-deoxyadenosine-3'-phosphorothioate
  modified_base 12: mod_base = OTHER; note = 5'-methyl-deoxycytidine-3'-phosphorothioate
  modified_base 13: mod_base = OTHER; note = 2'-deoxyadenosine-3'-phosphorothioate
  modified_base 14: mod_base = OTHER; note = 2'-deoxyguanosine-3'-phosphorothioate
  modified_base 15: mod_base = OTHER; note = 5'-methyl-deoxycytidine-3'-phosphorothioate
  modified_base 16: mod_base = OTHER; note = 2'-O-methylcytidine-3'-phosphorothioate
  modified_base 17: mod_base = OTHER; note = 2'-O-methyluridine-3'-phosphorothioate
  modified_base 18: mod_base = OTHER; note = 2'-O-methylcytidine-3'-phosphorothioate
  modified_base 19: mod_base = OTHER; note = 2'-O-methylcytidine-3'-phosphorothioate
  modified_base 20: mod_base = OTHER; note = 2'-O-methyladenosine-3'-phosphate
  misc_feature 1..5: note = RNA
  misc_feature 6..15: note = DNA
  misc_feature 16..20: note = RNA
cttcccttccacagcctcca

SEQ ID NO: 4233 - DNA, 20 bp, synthetic construct
  source 1..20: mol_type = other DNA; note = Description of Artificial Sequence: Synthetic oligonucleotide; note = Description of Combined DNA/RNA Molecule: Synthetic oligonucleotide
  modified_base 1: mod_base = OTHER; note = 2'-O-methyladenosine-3'-phosphorothioate
  modified_base 2: mod_base = OTHER; note = 2'-O-methyladenosine-3'-phosphorothioate
  modified_base 3: mod_base = OTHER; note = 2'-O-methylguanosine-3'-phosphorothioate
  modified_base 4: mod_base = OTHER; note = 2'-O-methyladenosine-3'-phosphorothioate
  modified_base 5: mod_base = OTHER; note = 2'-O-methylcytidine-3'-phosphorothioate
  modified_base 6: mod_base = OTHER; note = 2'-deoxythymidine-3'-phosphorothioate
  modified_base 7: mod_base = OTHER; note = 2'-deoxythymidine-3'-phosphorothioate
  modified_base 8: mod_base = OTHER; note = 5'-methyl-deoxycytidine-3'-phosphorothioate
  modified_base 9: mod_base = OTHER; note = 5'-methyl-deoxycytidine-3'-phosphorothioate
  modified_base 10: mod_base = OTHER; note = 2'-deoxyadenosine-3'-phosphorothioate
  modified_base 11: mod_base = OTHER; note = 5'-methyl-deoxycytidine-3'-phosphorothioate
  modified_base 12: mod_base = OTHER; note = 5'-methyl-deoxycytidine-3'-phosphorothioate
  modified_base 13: mod_base = OTHER; note = 2'-deoxythymidine-3'-phosphorothioate
  modified_base 14: mod_base = OTHER; note = 2'-deoxythymidine-3'-phosphorothioate
  modified_base 15: mod_base = OTHER; note = 5'-methyl-deoxycytidine-3'-phosphorothioate
  modified_base 16: mod_base = OTHER; note = 2'-O-methylcytidine-3'-phosphorothioate
  modified_base 17: mod_base = OTHER; note = 2'-O-methylcytidine-3'-phosphorothioate
  modified_base 18: mod_base = OTHER; note = 2'-O-methyluridine-3'-phosphorothioate
  modified_base 19: mod_base = OTHER; note = 2'-O-methyluridine-3'-phosphorothioate
  modified_base 20: mod_base = OTHER; note = 2'-O-methylcytidine-3'-phosphate
  misc_feature 1..5: note = RNA
  misc_feature 6..15: note = DNA
  misc_feature 16..20: note = RNA
aagacttccaccttcccttc

SEQ ID NO: 4234 - DNA, 20 bp, synthetic construct
  source 1..20: mol_type = other DNA; note = Description of Artificial Sequence: Synthetic oligonucleotide; note = Description of Combined DNA/RNA Molecule: Synthetic oligonucleotide
  modified_base 1: mod_base = OTHER; note = 2'-O-methylcytidine-3'-phosphorothioate
  modified_base 2: mod_base = OTHER; note = 2'-O-methylcytidine-3'-phosphorothioate
  modified_base 3: mod_base = OTHER; note = 2'-O-methylguanosine-3'-phosphorothioate
  modified_base 4: mod_base = OTHER; note = 2'-O-methyluridine-3'-phosphorothioate
  modified_base 5: mod_base = OTHER; note = 2'-O-methylcytidine-3'-phosphorothioate
  modified_base 6: mod_base = OTHER; note = 5'-methyl-deoxycytidine-3'-phosphorothioate
  modified_base 7: mod_base = OTHER; note = 2'-deoxyadenosine-3'-phosphorothioate
  modified_base 8: mod_base = OTHER; note = 2'-deoxyguanosine-3'-phosphorothioate
  modified_base 9: mod_base = OTHER; note = 2'-deoxyguanosine-3'-phosphorothioate
  modified_base 10: mod_base = OTHER; note = 2'-deoxyadenosine-3'-phosphorothioate
  modified_base 11: mod_base = OTHER; note = 2'-deoxyadenosine-3'-phosphorothioate
  modified_base 12: mod_base = OTHER; note = 2'-deoxyguanosine-3'-phosphorothioate
  modified_base 13: mod_base = OTHER; note = 2'-deoxyadenosine-3'-phosphorothioate
  modified_base 14: mod_base = OTHER; note = 5'-methyl-deoxycytidine-3'-phosphorothioate
  modified_base 15: mod_base = OTHER; note = 2'-deoxythymidine-3'-phosphorothioate
  modified_base 16: mod_base = OTHER; note = 2'-O-methyluridine-3'-phosphorothioate
  modified_base 17: mod_base = OTHER; note = 2'-O-methylcytidine-3'-phosphorothioate
  modified_base 18: mod_base = OTHER; note = 2'-O-methylcytidine-3'-phosphorothioate
  modified_base 19: mod_base = OTHER; note = 2'-O-methyladenosine-3'-phosphorothioate
  modified_base 20: mod_base = OTHER; note = 2'-O-methylcytidine-3'-phosphate
  misc_feature 1..5: note = RNA
  misc_feature 6..15: note = DNA
  misc_feature 16..20: note = RNA
ccgtccaggaagacttccac

SEQ ID NO: 4235 - DNA, 20 bp, synthetic construct
  source 1..20: mol_type = other DNA; note = Description of Artificial Sequence: Synthetic oligonucleotide; note = Description of Combined DNA/RNA Molecule: Synthetic oligonucleotide
  modified_base 1: mod_base = OTHER; note = 2'-O-methyluridine-3'-phosphorothioate
  modified_base 2: mod_base = OTHER; note = 2'-O-methylcytidine-3'-phosphorothioate
  modified_base 3: mod_base = OTHER; note = 2'-O-methylcytidine-3'-phosphorothioate
  modified_base 4: mod_base = OTHER; note = 2'-O-methylguanosine-3'-phosphorothioate
  modified_base 5: mod_base = OTHER; note = 2'-O-methylcytidine-3'-phosphorothioate
  modified_base 6: mod_base = OTHER; note = 2'-deoxyadenosine-3'-phosphorothioate
  modified_base 7: mod_base = OTHER; note = 5'-methyl-deoxycytidine-3'-phosphorothioate
  modified_base 8: mod_base = OTHER; note = 2'-deoxyadenosine-3'-phosphorothioate
  modified_base 9: mod_base = OTHER; note = 5'-methyl-deoxycytidine-3'-phosphorothioate
  modified_base 10: mod_base = OTHER; note = 5'-methyl-deoxycytidine-3'-phosphorothioate
  modified_base 11: mod_base = OTHER; note = 5'-methyl-deoxycytidine-3'-phosphorothioate
  modified_base 12: mod_base = OTHER; note = 5'-methyl-deoxycytidine-3'-phosphorothioate
  modified_base 13: mod_base = OTHER; note = 5'-methyl-deoxycytidine-3'-phosphorothioate
  modified_base 14: mod_base = OTHER; note = 2'-deoxyguanosine-3'-phosphorothioate
  modified_base 15: mod_base = OTHER; note = 2'-deoxythymidine-3'-phosphorothioate
  modified_base 16: mod_base = OTHER; note = 2'-O-methylcytidine-3'-phosphorothioate
  modified_base 17: mod_base = OTHER; note = 2'-O-methylcytidine-3'-phosphorothioate
  modified_base 18: mod_base = OTHER; note = 2'-O-methyladenosine-3'-phosphorothioate
  modified_base 19: mod_base = OTHER; note = 2'-O-methylguanosine-3'-phosphorothioate
  modified_base 20: mod_base = OTHER; note = 2'-O-methylguanosine-3'-phosphate
  misc_feature 1..5: note = RNA
  misc_feature 6..15: note = DNA
  misc_feature 16..20: note = RNA
tccgcacacccccgtccagg

SEQ ID NO: 4236 - DNA, 20 bp, synthetic construct
  source 1..20: mol_type = other DNA; note = Description of Artificial Sequence: Synthetic oligonucleotide; note = Description of Combined DNA/RNA Molecule: Synthetic oligonucleotide
  modified_base 1: mod_base = OTHER; note = 2'-O-methylcytidine-3'-phosphorothioate
  modified_base 2: mod_base = OTHER; note = 2'-O-methyladenosine-3'-phosphorothioate
  modified_base 3: mod_base = OTHER; note = 2'-O-methyluridine-3'-phosphorothioate
  modified_base 4: mod_base = OTHER; note = 2'-O-methylcytidine-3'-phosphorothioate
  modified_base 5: mod_base = OTHER; note = 2'-O-methyladenosine-3'-phosphorothioate
  modified_base 6: mod_base = OTHER; note = 2'-deoxyguanosine-3'-phosphorothioate
  modified_base 7: mod_base = OTHER; note = 2'-deoxythymidine-3'-phosphorothioate
  modified_base 8: mod_base = OTHER; note = 2'-deoxyguanosine-3'-phosphorothioate
  modified_base 9: mod_base = OTHER; note = 5'-methyl-deoxycytidine-3'-phosphorothioate
  modified_base 10: mod_base = OTHER; note = 5'-methyl-deoxycytidine-3'-phosphorothioate
  modified_base 11: mod_base = OTHER; note = 2'-deoxythymidine-3'-phosphorothioate
  modified_base 12: mod_base = OTHER; note = 2'-deoxythymidine-3'-phosphorothioate
  modified_base 13: mod_base = OTHER; note = 2'-deoxythymidine-3'-phosphorothioate
  modified_base 14: mod_base = OTHER; note = 5'-methyl-deoxycytidine-3'-phosphorothioate
  modified_base 15: mod_base = OTHER; note = 5'-methyl-deoxycytidine-3'-phosphorothioate
  modified_base 16: mod_base = OTHER; note = 2'-O-methylguanosine-3'-phosphorothioate
  modified_base 17: mod_base = OTHER; note = 2'-O-methylcytidine-3'-phosphorothioate
  modified_base 18: mod_base = OTHER; note = 2'-O-methyladenosine-3'-phosphorothioate
  modified_base 19: mod_base = OTHER; note = 2'-O-methylcytidine-3'-phosphorothioate
  modified_base 20: mod_base = OTHER; note = 2'-O-methyladenosine-3'-phosphate
  misc_feature 1..5: note = RNA
  misc_feature 6..15: note = DNA
  misc_feature 16..20: note = RNA
catcagtgcctttccgcaca

SEQ ID NO: 4237 - DNA, 20 bp, synthetic construct
  source 1..20: mol_type = other DNA; note = Description of Artificial Sequence: Synthetic oligonucleotide; note = Description of Combined DNA/RNA Molecule: Synthetic oligonucleotide
  modified_base 1: mod_base = OTHER; note = 2'-O-methyladenosine-3'-phosphorothioate
  modified_base 2: mod_base = OTHER; note = 2'-O-methylguanosine-3'-phosphorothioate
  modified_base 3: mod_base = OTHER; note = 2'-O-methylcytidine-3'-phosphorothioate
  modified_base 4: mod_base = OTHER; note = 2'-O-methyluridine-3'-phosphorothioate
  modified_base 5: mod_base = OTHER; note = 2'-O-methyluridine-3'-phosphorothioate
  modified_base 6: mod_base = OTHER; note = 2'-deoxythymidine-3'-phosphorothioate
  modified_base 7: mod_base = OTHER; note = 5'-methyl-deoxycytidine-3'-phosphorothioate
  modified_base 8: mod_base = OTHER; note = 2'-deoxyadenosine-3'-phosphorothioate
  modified_base 9: mod_base = OTHER; note = 2'-deoxyguanosine-3'-phosphorothioate
  modified_base 10: mod_base = OTHER; note = 2'-deoxyadenosine-3'-phosphorothioate
  modified_base 11: mod_base = OTHER; note = 2'-deoxyadenosine-3'-phosphorothioate
  modified_base 12: mod_base = OTHER; note = 5'-methyl-deoxycytidine-3'-phosphorothioate
  modified_base 13: mod_base = OTHER; note = 2'-deoxyadenosine-3'-phosphorothioate
  modified_base 14: mod_base = OTHER; note = 2'-deoxythymidine-3'-phosphorothioate
  modified_base 15: mod_base = OTHER; note = 5'-methyl-deoxycytidine-3'-phosphorothioate
  modified_base 16: mod_base = OTHER; note = 2'-O-methyladenosine-3'-phosphorothioate
  modified_base 17: mod_base = OTHER; note = 2'-O-methylguanosine-3'-phosphorothioate
  modified_base 18: mod_base = OTHER; note = 2'-O-methyluridine-3'-phosphorothioate
  modified_base 19: mod_base = OTHER; note = 2'-O-methylguanosine-3'-phosphorothioate
  modified_base 20: mod_base = OTHER; note = 2'-O-methylcytidine-3'-phosphate
  misc_feature 1..5: note = RNA
  misc_feature 6..15: note = DNA
  misc_feature 16..20: note = RNA
agctttcagaacatcagtgc

SEQ ID NO: 4238 - DNA, 20 bp, synthetic construct
  source 1..20: mol_type = other DNA; note = Description of Artificial Sequence: Synthetic oligonucleotide; note = Description of Combined DNA/RNA Molecule: Synthetic oligonucleotide
  modified_base 1: mod_base = OTHER; note = 2'-O-methylcytidine-3'-phosphorothioate
  modified_base 2: mod_base = OTHER; note = 2'-O-methyladenosine-3'-phosphorothioate
  modified_base 3: mod_base = OTHER; note = 2'-O-methyladenosine-3'-phosphorothioate
  modified_base 4: mod_base = OTHER; note = 2'-O-methylguanosine-3'-phosphorothioate
  modified_base 5: mod_base = OTHER; note = 2'-O-methyladenosine-3'-phosphorothioate
  modified_base 6: mod_base = OTHER; note = 2'-deoxyguanosine-3'-phosphorothioate
  modified_base 7: mod_base = OTHER; note = 5'-methyl-deoxycytidine-3'-phosphorothioate
  modified_base 8: mod_base = OTHER; note = 5'-methyl-deoxycytidine-3'-phosphorothioate
  modified_base 9: mod_base = OTHER; note = 2'-deoxyadenosine-3'-phosphorothioate
  modified_base 10: mod_base = OTHER; note = 2'-deoxyguanosine-3'-phosphorothioate
  modified_base 11: mod_base = OTHER; note = 2'-deoxyadenosine-3'-phosphorothioate
  modified_base 12: mod_base = OTHER; note = 2'-deoxyguanosine-3'-phosphorothioate
  modified_base 13: mod_base = OTHER; note = 5'-methyl-deoxycytidine-3'-phosphorothioate
  modified_base 14: mod_base = OTHER; note = 2'-deoxythymidine-3'-phosphorothioate
  modified_base 15: mod_base = OTHER; note = 2'-deoxythymidine-3'-phosphorothioate
  modified_base 16: mod_base = OTHER; note = 2'-O-methyluridine-3'-phosphorothioate
  modified_base 17: mod_base = OTHER; note = 2'-O-methylcytidine-3'-phosphorothioate
  modified_base 18: mod_base = OTHER; note = 2'-O-methyladenosine-3'-phosphorothioate
  modified_base 19: mod_base = OTHER; note = 2'-O-methylguanosine-3'-phosphorothioate
  modified_base 20: mod_base = OTHER; note = 2'-O-methyladenosine-3'-phosphate
  misc_feature 1..5: note = RNA
  misc_feature 6..15: note = DNA
  misc_feature 16..20: note = RNA
caagagccagagctttcaga

SEQ ID NO: 4239 - DNA, 20 bp, synthetic construct
  source 1..20: mol_type = other DNA; note = Description of Artificial Sequence: Synthetic oligonucleotide
  modified_base 1: mod_base = OTHER; note = 2'-O-methyladenosine-3'-phosphorothioate
  modified_base 2: mod_base = OTHER; note = 2'-O-methylcytidine-3'-phosphorothioate
  modified_base 3: mod_base = OTHER; note = 2'-O-methyladenosine-3'-phosphorothioate
  modified_base 4: mod_base = OTHER; note = 2'-O-methylguanosine-3'-phosphorothioate
  modified_base 5: mod_base = OTHER; note = 2'-O-methylcytidine-3'-phosphorothioate
  modified_base 6: mod_base = OTHER; note = 5'-methyl-deoxycytidine-3'-phosphorothioate
  modified_base 7: mod_base = OTHER; note = 2'-deoxythymidine-3'-phosphorothioate
  modified_base 8: mod_base = OTHER; note = 2'-deoxythymidine-3'-phosphorothioate
  modified_base 9: mod_base = OTHER; note = 2'-deoxyguanosine-3'-phosphorothioate
  modified_base 10: mod_base = OTHER; note = 2'-deoxyguanosine-3'-phosphorothioate
  modified_base 11: mod_base = OTHER; note = 5'-methyl-deoxycytidine-3'-phosphorothioate
  modified_base 12: mod_base = OTHER; note = 2'-deoxyguanosine-3'-phosphorothioate
  modified_base 13: mod_base = OTHER; note = 5'-methyl-deoxycytidine-3'-phosphorothioate
  modified_base 14: mod_base = OTHER; note = 5'-methyl-deoxycytidine-3'-phosphorothioate
  modified_base 15: mod_base = OTHER; note = 2'-deoxyadenosine-3'-phosphorothioate
  modified_base 16: mod_base = OTHER; note = 2'-O-methyladenosine-3'-phosphorothioate
  modified_base 17: mod_base = OTHER; note = 2'-O-methylguanosine-3'-phosphorothioate
  modified_base 18: mod_base = OTHER; note = 2'-O-methyladenosine-3'-phosphorothioate
  modified_base 19: mod_base = OTHER; note = 2'-O-methylguanosine-3'-phosphorothioate
  modified_base 20: mod_base = OTHER; note = 2'-O-methylcytidine-3'-phosphate
  misc_feature 1..5: note = RNA
  misc_feature 6..15: note = DNA
  misc_feature 16..20: note = RNA
acagccttggcgccaagagc

SEQ ID NO: 4240 - DNA, 20 bp, synthetic construct
  source 1..20: mol_type = other DNA; note = Description of Artificial Sequence: Synthetic oligonucleotide; note = Description of Combined DNA/RNA Molecule: Synthetic oligonucleotide
  modified_base 1: mod_base = OTHER; note = 2'-O-methyluridine-3'-phosphorothioate
  modified_base 2: mod_base = OTHER; note = 2'-O-methylcytidine-3'-phosphorothioate
  modified_base 3: mod_base = OTHER; note = 2'-O-methylcytidine-3'-phosphorothioate
  modified_base 4: mod_base = OTHER; note = 2'-O-methylcytidine-3'-phosphorothioate
  modified_base 5: mod_base = OTHER; note = 2'-O-methylcytidine-3'-phosphorothioate
  modified_base 6: mod_base = OTHER; note = 2'-deoxyadenosine-3'-phosphorothioate
  modified_base 7: mod_base = OTHER; note = 5'-methyl-deoxycytidine-3'-phosphorothioate
  modified_base 8: mod_base = OTHER; note = 2'-deoxyadenosine-3'-phosphorothioate
  modified_base 9: mod_base = OTHER; note = 2'-deoxyadenosine-3'-phosphorothioate
  modified_base 10: mod_base = OTHER; note = 2'-deoxyadenosine-3'-phosphorothioate
  modified_base 11: mod_base = OTHER; note = 5'-methyl-deoxycytidine-3'-phosphorothioate
  modified_base 12: mod_base = OTHER; note = 2'-deoxyadenosine-3'-phosphorothioate
  modified_base 13: mod_base = OTHER; note = 5'-methyl-deoxycytidine-3'-phosphorothioate
  modified_base 14: mod_base = OTHER; note = 2'-deoxyadenosine-3'-phosphorothioate
  modified_base 15: mod_base = OTHER; note = 2'-deoxyguanosine-3'-phosphorothioate
  modified_base 16: mod_base = OTHER; note = 2'-O-methylcytidine-3'-phosphorothioate
  modified_base 17: mod_base = OTHER; note = 2'-O-methylcytidine-3'-phosphorothioate
  modified_base 18: mod_base = OTHER; note = 2'-O-methyluridine-3'-phosphorothioate
  modified_base 19: mod_base = OTHER; note = 2'-O-methyluridine-3'-phosphorothioate
  modified_base 20: mod_base = OTHER; note = 2'-O-methylguanosine-3'-phosphate
  misc_feature 1..5: note = RNA
  misc_feature 6..15: note = DNA
  misc_feature 16..20: note = RNA
tccccacaaacacagccttg

SEQ ID NO: 4241 - DNA, 20 bp, synthetic construct
  source 1..20: mol_type = other DNA; note = Description of Artificial Sequence: Synthetic oligonucleotide; note = Description of Combined DNA/RNA Molecule: Synthetic oligonucleotide
  modified_base 1: mod_base = OTHER; note = 2'-O-methyladenosine-3'-phosphorothioate
  modified_base 2: mod_base = OTHER; note = 2'-O-methylcytidine-3'-phosphorothioate
  modified_base 3: mod_base = OTHER; note = 2'-O-methylguanosine-3'-phosphorothioate
  modified_base 4: mod_base = OTHER; note = 2'-O-methyladenosine-3'-phosphorothioate
  modified_base 5: mod_base = OTHER; note = 2'-O-methyluridine-3'-phosphorothioate
  modified_base 6: mod_base = OTHER; note = 2'-deoxythymidine-3'-phosphorothioate
  modified_base 7: mod_base = OTHER; note = 2'-deoxyguanosine-3'-phosphorothioate
  modified_base 8: mod_base = OTHER; note = 2'-deoxyguanosine-3'-phosphorothioate
  modified_base 9: mod_base = OTHER; note = 2'-deoxythymidine-3'-phosphorothioate
  modified_base 10: mod_base = OTHER; note = 5'-methyl-deoxycytidine-3'-phosphorothioate
  modified_base 11: mod_base = OTHER; note = 2'-deoxythymidine-3'-phosphorothioate
  modified_base 12: mod_base = OTHER; note = 5'-methyl-deoxycytidine-3'-phosphorothioate
  modified_base 13: mod_base = OTHER; note = 5'-methyl-deoxycytidine-3'-phosphorothioate
  modified_base 14: mod_base = OTHER; note = 5'-methyl-deoxycytidine-3'-phosphorothioate
  modified_base 15: mod_base = OTHER; note = 5'-methyl-deoxycytidine-3'-phosphorothioate
  modified_base 16: mod_base = OTHER; note = 2'-O-methyladenosine-3'-phosphorothioate
  modified_base 17: mod_base = OTHER; note = 2'-O-methylcytidine-3'-phosphorothioate
  modified_base 18: mod_base = OTHER; note = 2'-O-methyladenosine-3'-phosphorothioate
  modified_base 19: mod_base = OTHER; note = 2'-O-methyladenosine-3'-phosphorothioate
  modified_base 20: mod_base = OTHER; note = 2'-O-methyladenosine-3'-phosphate
  misc_feature 1..5: note = RNA
  misc_feature 6..15: note = DNA
  misc_feature 16..20: note = RNA
acgattggtctccccacaaa

SEQ ID NO: 4242 - DNA, 20 bp, synthetic construct
  source 1..20: mol_type = other DNA; note = Description of Artificial Sequence: Synthetic oligonucleotide; note = Description of Combined DNA/RNA Molecule: Synthetic oligonucleotide
  modified_base 1: mod_base = OTHER; note = 2'-O-methyluridine-3'-phosphorothioate
  modified_base 2: mod_base = OTHER; note = 2'-O-methyladenosine-3'-phosphorothioate
  modified_base 3: mod_base = OTHER; note = 2'-O-methyladenosine-3'-phosphorothioate
  modified_base 4: mod_base = OTHER; note = 2'-O-methylguanosine-3'-phosphorothioate
  modified_base 5: mod_base = OTHER; note = 2'-O-methylcytidine-3'-phosphorothioate
  modified_base 6: mod_base = OTHER; note = 5'-methyl-deoxycytidine-3'-phosphorothioate
  modified_base 7: mod_base = OTHER; note = 5'-methyl-deoxycytidine-3'-phosphorothioate
  modified_base 8: mod_base = OTHER; note = 5'-methyl-deoxycytidine-3'-phosphorothioate
  modified_base 9: mod_base = OTHER; note = 2'-deoxyadenosine-3'-phosphorothioate
  modified_base 10: mod_base = OTHER; note = 2'-deoxyadenosine-3'-phosphorothioate
  modified_base 11: mod_base = OTHER; note = 2'-deoxyadenosine-3'-phosphorothioate
  modified_base 12: mod_base = OTHER; note = 5'-methyl-deoxycytidine-3'-phosphorothioate
  modified_base 13: mod_base = OTHER; note = 2'-deoxyguanosine-3'-phosphorothioate
  modified_base 14: mod_base = OTHER; note = 2'-deoxyadenosine-3'-phosphorothioate
  modified_base 15: mod_base = OTHER; note = 2'-deoxythymidine-3'-phosphorothioate
  modified_base 16: mod_base = OTHER; note = 2'-O-methyluridine-3'-phosphorothioate
  modified_base 17: mod_base = OTHER; note = 2'-O-methylguanosine-3'-phosphorothioate
  modified_base 18: mod_base = OTHER; note = 2'-O-methylguanosine-3'-phosphorothioate
  modified_base 19: mod_base = OTHER; note = 2'-O-methyluridine-3'-phosphorothioate
  modified_base 20: mod_base = OTHER; note = 2'-O-methylcytidine-3'-phosphate
  misc_feature 1..5: note = RNA
  misc_feature 6..15: note = DNA
  misc_feature 16..20: note = RNA
taagccccaaacgattggtc

SEQ ID NO: 4243 - DNA, 20 bp, synthetic construct
  source 1..20: mol_type = other DNA; note = Description of Artificial Sequence: Synthetic oligonucleotide; note = Description of Combined DNA/RNA Molecule: Synthetic oligonucleotide
  modified_base 1: mod_base = OTHER; note = 2'-O-methylcytidine-3'-phosphorothioate
  modified_base 2: mod_base = OTHER; note = 2'-O-methylcytidine-3'-phosphorothioate
  modified_base 3: mod_base = OTHER; note = 2'-O-methylcytidine-3'-phosphorothioate
  modified_base 4: mod_base = OTHER; note = 2'-O-methyluridine-3'-phosphorothioate
  modified_base 5: mod_base = OTHER; note = 2'-O-methylguanosine-3'-phosphorothioate
  modified_base 6: mod_base = OTHER; note = 2'-deoxyguanosine-3'-phosphorothioate
  modified_base 7: mod_base = OTHER; note = 2'-deoxyadenosine-3'-phosphorothioate
  modified_base 8: mod_base = OTHER; note = 2'-deoxyadenosine-3'-phosphorothioate
  modified_base 9: mod_base = OTHER; note = 2'-deoxyadenosine-3'-phosphorothioate
  modified_base 10: mod_base = OTHER; note = 2'-deoxyguanosine-3'-phosphorothioate
  modified_base 11: mod_base = OTHER; note = 5'-methyl-deoxycytidine-3'-phosphorothioate
  modified_base 12: mod_base = OTHER; note = 2'-deoxythymidine-3'-phosphorothioate
  modified_base 13: mod_base = OTHER; note = 2'-deoxyadenosine-3'-phosphorothioate
  modified_base 14: mod_base = OTHER; note = 2'-deoxyadenosine-3'-phosphorothioate
  modified_base 15: mod_base = OTHER; note = 2'-deoxyguanosine-3'-phosphorothioate
  modified_base 16: mod_base = OTHER; note = 2'-O-methylcytidine-3'-phosphorothioate
  modified_base 17: mod_base = OTHER; note = 2'-O-methylcytidine-3'-phosphorothioate
  modified_base 18: mod_base = OTHER; note = 2'-O-methylcytidine-3'-phosphorothioate
  modified_base 19: mod_base = OTHER; note = 2'-O-methylcytidine-3'-phosphorothioate
  modified_base 20: mod_base = OTHER; note = 2'-O-methyladenosine-3'-phosphate
  misc_feature 1..5: note = RNA
  misc_feature 6..15: note = DNA
  misc_feature 16..20: note = RNA
ccctggaaagctaagcccca

SEQ ID NO: 4244 - DNA, 20 bp, synthetic construct
  source 1..20: mol_type = other DNA; note = Description of Artificial Sequence: Synthetic oligonucleotide; note = Description of Combined DNA/RNA Molecule: Synthetic oligonucleotide
  modified_base 1: mod_base = OTHER; note = 2'-O-methylcytidine-3'-phosphorothioate
  modified_base 2: mod_base = OTHER; note = 2'-O-methyladenosine-3'-phosphorothioate
  modified_base 3: mod_base = OTHER; note = 2'-O-methylcytidine-3'-phosphorothioate
  modified_base 4: mod_base = OTHER; note = 2'-O-methylcytidine-3'-phosphorothioate
  modified_base 5: mod_base = OTHER; note = 2'-O-methyluridine-3'-phosphorothioate
  modified_base 6: mod_base = OTHER; note = 2'-deoxythymidine-3'-phosphorothioate
  modified_base 7: mod_base = OTHER; note = 2'-deoxythymidine-3'-phosphorothioate
  modified_base 8: mod_base = OTHER; note = 5'-methyl-deoxycytidine-3'-phosphorothioate
  modified_base 9: mod_base = OTHER; note = 2'-deoxythymidine-3'-phosphorothioate
  modified_base 10: mod_base = OTHER; note = 5'-methyl-deoxycytidine-3'-phosphorothioate
  modified_base 11: mod_base = OTHER; note = 5'-methyl-deoxycytidine-3'-phosphorothioate
  modified_base 12: mod_base = OTHER; note = 5'-methyl-deoxycytidine-3'-phosphorothioate
  modified_base 13: mod_base = OTHER; note = 5'-methyl-deoxycytidine-3'-phosphorothioate
  modified_base 14: mod_base = OTHER; note = 5'-methyl-deoxycytidine-3'-phosphorothioate
  modified_base 15: mod_base = OTHER; note = 2'-deoxythymidine-3'-phosphorothioate
  modified_base 16: mod_base = OTHER; note = 2'-O-methylguanosine-3'-phosphorothioate
  modified_base 17: mod_base = OTHER; note = 2'-O-methylguanosine-3'-phosphorothioate
  modified_base 18: mod_base = OTHER; note = 2'-O-methyladenosine-3'-phosphorothioate
  modified_base 19: mod_base = OTHER; note = 2'-O-methyladenosine-3'-phosphorothioate
  modified_base 20: mod_base = OTHER; note = 2'-O-methyladenosine-3'-phosphate
  misc_feature 1..5: note = RNA
  misc_feature 6..15: note = DNA
  misc_feature 16..20: note = RNA
cacctttctccccctggaaa

SEQ ID NO: 4245 - DNA, 20 bp, synthetic construct
  source 1..20: mol_type = other DNA; note = Description of Artificial Sequence: Synthetic oligonucleotide; note = Description of Combined DNA/RNA Molecule: Synthetic oligonucleotide
  modified_base 1: mod_base = OTHER; note = 2'-O-methylguanosine-3'-phosphorothioate
  modified_base 2: mod_base = OTHER; note = 2'-O-methyladenosine-3'-phosphorothioate
  modified_base 3: mod_base = OTHER; note = 2'-O-methylcytidine-3'-phosphorothioate
  modified_base 4: mod_base = OTHER; note = 2'-O-methyladenosine-3'-phosphorothioate
  modified_base 5: mod_base = OTHER; note = 2'-O-methyluridine-3'-phosphorothioate
  modified_base 6: mod_base = OTHER; note = 5'-methyl-deoxycytidine-3'-phosphorothioate
  modified_base 7: mod_base = OTHER; note = 2'-deoxythymidine-3'-phosphorothioate
  modified_base 8: mod_base = OTHER; note = 2'-deoxythymidine-3'-phosphorothioate
  modified_base 9: mod_base = OTHER; note = 2'-deoxyguanosine-3'-phosphorothioate
  modified_base 10: mod_base = OTHER; note = 2'-deoxyadenosine-3'-phosphorothioate
  modified_base 11: mod_base = OTHER; note = 2'-deoxyadenosine-3'-phosphorothioate
  modified_base 12: mod_base = OTHER; note = 5'-methyl-deoxycytidine-3'-phosphorothioate
  modified_base 13: mod_base = OTHER; note = 2'-deoxyadenosine-3'-phosphorothioate
  modified_base 14: mod_base = OTHER; note = 5'-methyl-deoxycytidine-3'-phosphorothioate
  modified_base 15: mod_base = OTHER; note = 5'-methyl-deoxycytidine-3'-phosphorothioate
  modified_base 16: mod_base = OTHER; note = 2'-O-methyluridine-3'-phosphorothioate
  modified_base 17: mod_base = OTHER; note = 2'-O-methyluridine-3'-phosphorothioate
  modified_base 18: mod_base = OTHER; note = 2'-O-methyluridine-3'-phosphorothioate
  modified_base 19: mod_base = OTHER; note = 2'-O-methylcytidine-3'-phosphorothioate
  modified_base 20: mod_base = OTHER; note = 2'-O-methyluridine-3'-phosphate
  misc_feature 1..5: note = RNA
  misc_feature 6..15: note = DNA
  misc_feature 16..20: note = RNA
gacatcttgaacacctttct

SEQ ID NO: 4246 - DNA, 20 bp, synthetic construct
  source 1..20: mol_type = other DNA; note = Description of Artificial Sequence: Synthetic oligonucleotide; note = Description of Combined DNA/RNA Molecule: Synthetic oligonucleotide
  modified_base 1: mod_base = OTHER; note = 2'-O-methyluridine-3'-phosphorothioate
  modified_base 2: mod_base = OTHER; note = 2'-O-methyladenosine-3'-phosphorothioate
  modified_base 3: mod_base = OTHER; note = 2'-O-methylguanosine-3'-phosphorothioate
  modified_base 4: mod_base = OTHER; note = 2'-O-methyluridine-3'-phosphorothioate
  modified_base 5: mod_base = OTHER; note = 2'-O-methyladenosine-3'-phosphorothioate
  modified_base 6: mod_base = OTHER; note = 2'-deoxythymidine-3'-phosphorothioate
  modified_base 7: mod_base = OTHER; note = 5'-methyl-deoxycytidine-3'-phosphorothioate
  modified_base 8: mod_base = OTHER; note = 2'-deoxythymidine-3'-phosphorothioate
  modified_base 9: mod_base = OTHER; note = 5'-methyl-deoxycytidine-3'-phosphorothioate
  modified_base 10: mod_base = OTHER; note = 2'-deoxyguanosine-3'-phosphorothioate
  modified_base 11: mod_base = OTHER; note = 2'-deoxyadenosine-3'-phosphorothioate
  modified_base 12: mod_base = OTHER; note = 2'-deoxyguanosine-3'-phosphorothioate
  modified_base 13: mod_base = OTHER; note = 2'-deoxyguanosine-3'-phosphorothioate
  modified_base 14: mod_base = OTHER; note = 2'-deoxyadenosine-3'-phosphorothioate
  modified_base 15: mod_base = OTHER; note = 5'-methyl-deoxycytidine-3'-phosphorothioate
  modified_base 16: mod_base = OTHER; note = 2'-O-methyladenosine-3'-phosphorothioate
  modified_base 17: mod_base = OTHER; note = 2'-O-methyluridine-3'-phosphorothioate
  modified_base 18: mod_base = OTHER; note = 2'-O-methylcytidine-3'-phosphorothioate
  modified_base 19: mod_base = OTHER; note = 2'-O-methyluridine-3'-phosphorothioate
  modified_base 20: mod_base = OTHER; note = 2'-O-methyluridine-3'-phosphate
  misc_feature 1..5: note = RNA
  misc_feature 6..15: note = DNA
  misc_feature 16..20: note = RNA
tagtatctcgaggacatctt

SEQ ID NO: 4247 - DNA, 20 bp, synthetic construct
  source 1..20: mol_type = other DNA; note = Description of Artificial Sequence: Synthetic oligonucleotide; note = Description of Combined DNA/RNA Molecule: Synthetic oligonucleotide
  modified_base 1: mod_base = OTHER; note = 2'-O-methylguanosine-3'-phosphorothioate
  modified_base 2: mod_base = OTHER; note = 2'-O-methyladenosine-3'-phosphorothioate
  modified_base 3: mod_base = OTHER; note = 2'-O-methyladenosine-3'-phosphorothioate
  modified_base 4: mod_base = OTHER; note = 2'-O-methyluridine-3'-phosphorothioate
  modified_base 5: mod_base = OTHER; note = 2'-O-methyluridine-3'-phosphorothioate
  modified_base 6: mod_base = OTHER; note = 5'-methyl-deoxycytidine-3'-phosphorothioate
  modified_base 7: mod_base = OTHER; note = 2'-deoxythymidine-3'-phosphorothioate
  modified_base 8: mod_base = OTHER; note = 2'-deoxythymidine-3'-phosphorothioate
  modified_base 9: mod_base = OTHER; note = 5'-methyl-deoxycytidine-3'-phosphorothioate
  modified_base 10: mod_base = OTHER; note = 5'-methyl-deoxycytidine-3'-phosphorothioate
  modified_base 11: mod_base = OTHER; note = 2'-deoxythymidine-3'-phosphorothioate
  modified_base 12: mod_base = OTHER; note = 2'-deoxythymidine-3'-phosphorothioate
  modified_base 13: mod_base = OTHER; note = 2'-deoxythymidine-3'-phosphorothioate
  modified_base 14: mod_base = OTHER; note = 2'-deoxyadenosine-3'-phosphorothioate
  modified_base 15: mod_base = OTHER; note = 2'-deoxyguanosine-3'-phosphorothioate
  modified_base 16: mod_base = OTHER; note = 2'-O-methyluridine-3'-phosphorothioate
  modified_base 17: mod_base = OTHER; note = 2'-O-methyladenosine-3'-phosphorothioate
  modified_base 18: mod_base = OTHER; note = 2'-O-methyluridine-3'-phosphorothioate
  modified_base 19: mod_base = OTHER; note = 2'-O-methylcytidine-3'-phosphorothioate
  modified_base 20: mod_base = OTHER; note = 2'-O-methyluridine-3'-phosphate
  misc_feature 1..5: note = RNA
  misc_feature 6..15: note = DNA
  misc_feature 16..20: note = RNA
gaattcttcctttagtatct

SEQ ID NO: 4248 - DNA, 20 bp, synthetic construct
  source 1..20: mol_type = other DNA; note = Description of Artificial Sequence: Synthetic oligonucleotide; note = Description of Combined DNA/RNA Molecule: Synthetic oligonucleotide
  modified_base 1: mod_base = OTHER; note = 2'-O-methylguanosine-3'-phosphorothioate
  modified_base 2: mod_base = OTHER; note = 2'-O-methylguanosine-3'-phosphorothioate
  modified_base 3: mod_base = OTHER; note = 2'-O-methylcytidine-3'-phosphorothioate
  modified_base 4: mod_base = OTHER; note = 2'-O-methylcytidine-3'-phosphorothioate
  modified_base 5: mod_base = OTHER; note = 2'-O-methyladenosine-3'-phosphorothioate
  modified_base 6: mod_base = OTHER; note = 2'-deoxyadenosine-3'-phosphorothioate
  modified_base 7: mod_base = OTHER; note = 5'-methyl-deoxycytidine-3'-phosphorothioate
  modified_base 8: mod_base = OTHER; note = 5'-methyl-deoxycytidine-3'-phosphorothioate
  modified_base 9: mod_base = OTHER; note = 2'-deoxyguanosine-3'-phosphorothioate
  modified_base 10: mod_base = OTHER; note = 2'-deoxyguanosine-3'-phosphorothioate
  modified_base 11: mod_base = OTHER; note = 2'-deoxyadenosine-3'-phosphorothioate
  modified_base 12: mod_base = OTHER; note = 2'-deoxyadenosine-3'-phosphorothioate
  modified_base 13: mod_base = OTHER; note = 2'-deoxythymidine-3'-phosphorothioate
  modified_base 14: mod_base = OTHER; note = 2'-deoxythymidine-3'-phosphorothioate
  modified_base 15: mod_base = OTHER; note = 5'-methyl-deoxycytidine-3'-phosphorothioate
  modified_base 16: mod_base = OTHER; note = 2'-O-methyluridine-3'-phosphorothioate
  modified_base 17: mod_base = OTHER; note = 2'-O-methyluridine-3'-phosphorothioate
  modified_base 18: mod_base = OTHER; note = 2'-O-methylcytidine-3'-phosphorothioate
  modified_base 19: mod_base = OTHER; note = 2'-O-methylcytidine-3'-phosphorothioate
  modified_base 20: mod_base = OTHER; note = 2'-O-methyluridine-3'-phosphate
  misc_feature 1..5: note = RNA
  misc_feature 6..15: note = DNA
  misc_feature 16..20: note = RNA
ggccaaccggaattcttcct

SEQ ID NO: 4249 - DNA, 20 bp, synthetic construct
  source 1..20: mol_type = other DNA; note = Description of Artificial Sequence: Synthetic oligonucleotide; note = Description of Combined DNA/RNA Molecule: Synthetic oligonucleotide
  modified_base 1: mod_base = OTHER; note = 2'-O-methylcytidine-3'-phosphorothioate
  modified_base 2: mod_base = OTHER; note = 2'-O-methyluridine-3'-phosphorothioate
  modified_base 3: mod_base = OTHER; note = 2'-O-methylcytidine-3'-phosphorothioate
  modified_base 4: mod_base = OTHER; note = 2'-O-methyladenosine-3'-phosphorothioate
  modified_base 5: mod_base = OTHER; note = 2'-O-methylguanosine-3'-phosphorothioate
  modified_base 6: mod_base = OTHER; note = 2'-deoxyadenosine-3'-phosphorothioate
  modified_base 7: mod_base = OTHER; note = 2'-deoxyguanosine-3'-phosphorothioate
  modified_base 8: mod_base = OTHER; note = 5'-methyl-deoxycytidine-3'-phosphorothioate
  modified_base 9: mod_base = OTHER; note = 5'-methyl-deoxycytidine-3'-phosphorothioate
  modified_base 10: mod_base = OTHER; note = 2'-deoxyadenosine-3'-phosphorothioate
  modified_base 11: mod_base = OTHER; note = 2'-deoxythymidine-3'-phosphorothioate
  modified_base 12: mod_base = OTHER; note = 2'-deoxyguanosine-3'-phosphorothioate
  modified_base 13: mod_base = OTHER; note = 2'-deoxyguanosine-3'-phosphorothioate
  modified_base 14: mod_base = OTHER; note = 5'-methyl-deoxycytidine-3'-phosphorothioate
  modified_base 15: mod_base = OTHER; note = 5'-methyl-deoxycytidine-3'-phosphorothioate
  modified_base 16: mod_base = OTHER; note = 2'-O-methyladenosine-3'-phosphorothioate
  modified_base 17: mod_base = OTHER; note = 2'-O-methyladenosine-3'-phosphorothioate
  modified_base 18: mod_base = OTHER; note = 2'-O-methylcytidine-3'-phosphorothioate
  modified_base 19: mod_base = OTHER; note = 2'-O-methylcytidine-3'-phosphorothioate
  modified_base 20: mod_base = OTHER; note = 2'-O-methylguanosine-3'-phosphate
  misc_feature 1..5: note = RNA
  misc_feature 6..15: note = DNA
  misc_feature 16..20: note = RNA
ctcagagccatggccaaccg

SEQ ID NO: 4250 - DNA, 20 bp, synthetic construct
  source 1..20: mol_type = other DNA; note = Description of Artificial Sequence: Synthetic oligonucleotide; note = Description of Combined DNA/RNA Molecule: Synthetic oligonucleotide
  modified_base 1: mod_base = OTHER; note = 2'-O-methyladenosine-3'-phosphorothioate
  modified_base 2: mod_base = OTHER; note = 2'-O-methyluridine-3'-phosphorothioate
  modified_base 3: mod_base = OTHER; note = 2'-O-methyluridine-3'-phosphorothioate
  modified_base 4: mod_base = OTHER; note = 2'-O-methylcytidine-3'-phosphorothioate
  modified_base 5: mod_base = OTHER; note = 2'-O-methyluridine-3'-phosphorothioate
  modified_base 6: mod_base = OTHER; note = 2'-deoxyguanosine-3'-phosphorothioate
  modified_base 7: mod_base = OTHER; note = 2'-deoxyguanosine-3'-phosphorothioate
  modified_base 8: mod_base = OTHER; note = 5'-methyl-deoxycytidine-3'-phosphorothioate
  modified_base 9: mod_base = OTHER; note = 2'-deoxyadenosine-3'-phosphorothioate
  modified_base 10: mod_base = OTHER; note = 5'-methyl-deoxycytidine-3'-phosphorothioate
  modified_base 11: mod_base = OTHER; note = 5'-methyl-deoxycytidine-3'-phosphorothioate
  modified_base 12: mod_base = OTHER; note = 5'-methyl-deoxycytidine-3'-phosphorothioate
  modified_base 13: mod_base = OTHER; note = 2'-deoxyadenosine-3'-phosphorothioate
  modified_base 14: mod_base = OTHER; note = 5'-methyl-deoxycytidine-3'-phosphorothioate
  modified_base 15: mod_base = OTHER; note = 2'-deoxythymidine-3'-phosphorothioate
  modified_base 16: mod_base = OTHER; note = 2'-O-methylcytidine-3'-phosphorothioate
  modified_base 17: mod_base = OTHER; note = 2'-O-methyladenosine-3'-phosphorothioate
  modified_base 18: mod_base = OTHER; note = 2'-O-methylguanosine-3'-phosphorothioate
  modified_base 19: mod_base = OTHER; note = 2'-O-methyladenosine-3'-phosphorothioate
  modified_base 20: mod_base = OTHER; note = 2'-O-methylguanosine-3'-phosphate
  misc_feature 1..5: note = RNA
  misc_feature 6..15: note = DNA
  misc_feature 16..20: note = RNA
attctggcacccactcagag

SEQ ID NO: 4251 - DNA, 20 bp, synthetic construct
  source 1..20: mol_type = other DNA; note = Description of Artificial Sequence: Synthetic oligonucleotide; note = Description of Combined DNA/RNA Molecule: Synthetic oligonucleotide
  modified_base 1: mod_base = OTHER; note = 2'-O-methyladenosine-3'-phosphorothioate
  modified_base 2: mod_base = OTHER; note = 2'-O-methyluridine-3'-phosphorothioate
  modified_base 3: mod_base = OTHER; note = 2'-O-methylguanosine-3'-phosphorothioate
  modified_base 4: mod_base = OTHER; note = 2'-O-methyladenosine-3'-phosphorothioate
  modified_base 5: mod_base = OTHER; note = 2'-O-methylcytidine-3'-phosphorothioate
  modified_base 6: mod_base = OTHER; note = 2'-deoxythymidine-3'-phosphorothioate
  modified_base 7: mod_base = OTHER; note = 2'-deoxythymidine-3'-phosphorothioate
  modified_base 8: mod_base = OTHER; note = 2'-deoxythymidine-3'-phosphorothioate
  modified_base 9: mod_base = OTHER; note = 5'-methyl-deoxycytidine-3'-phosphorothioate
  modified_base 10: mod_base = OTHER; note = 2'-deoxyadenosine-3'-phosphorothioate
  modified_base 11: mod_base = OTHER; note = 5'-methyl-deoxycytidine-3'-phosphorothioate
  modified_base 12: mod_base = OTHER; note = 2'-deoxyadenosine-3'-phosphorothioate
  modified_base 13: mod_base = OTHER; note = 2'-deoxythymidine-3'-phosphorothioate
  modified_base 14: mod_base = OTHER; note = 2'-deoxythymidine-3'-phosphorothioate
  modified_base 15: mod_base = OTHER; note = 5'-methyl-deoxycytidine-3'-phosphorothioate
  modified_base 16: mod_base = OTHER; note = 2'-O-methyluridine-3'-phosphorothioate
  modified_base 17: mod_base = OTHER; note = 2'-O-methylguanosine-3'-phosphorothioate
  modified_base 18: mod_base = OTHER; note = 2'-O-methylguanosine-3'-phosphorothioate
  modified_base 19: mod_base = OTHER; note = 2'-O-methylcytidine-3'-phosphorothioate
  modified_base 20: mod_base = OTHER; note = 2'-O-methyladenosine-3'-phosphate
  misc_feature 1..5: note = RNA
  misc_feature 6..15: note = DNA
  misc_feature 16..20: note = RNA
atgactttcacattctggca

SEQ ID NO: 4252 - DNA, 20 bp, synthetic construct
  source 1..20: mol_type = other DNA; note = Description of Artificial Sequence: Synthetic oligonucleotide; note = Description of Combined DNA/RNA Molecule: Synthetic oligonucleotide
  modified_base 1: mod_base = OTHER; note = 2'-O-methylguanosine-3'-phosphorothioate
  modified_base 2: mod_base = OTHER; note = 2'-O-methyluridine-3'-phosphorothioate
  modified_base 3: mod_base = OTHER; note = 2'-O-methylcytidine-3'-phosphorothioate
  modified_base 4: mod_base = OTHER; note = 2'-O-methyluridine-3'-phosphorothioate
  modified_base 5: mod_base = OTHER; note = 2'-O-methyluridine-3'-phosphorothioate
  modified_base 6: mod_base = OTHER; note = 2'-deoxyguanosine-3'-phosphorothioate
  modified_base 7: mod_base = OTHER; note = 2'-deoxythymidine-3'-phosphorothioate
  modified_base 8: mod_base = OTHER; note = 5'-methyl-deoxycytidine-3'-phosphorothioate
  modified_base 9: mod_base = OTHER; note = 2'-deoxyguanosine-3'-phosphorothioate
  modified_base 10: mod_base = OTHER; note = 2'-deoxyadenosine-3'-phosphorothioate
  modified_base 11: mod_base = OTHER; note = 2'-deoxythymidine-3'-phosphorothioate
  modified_base 12: mod_base = OTHER; note = 2'-deoxyguanosine-3'-phosphorothioate
  modified_base 13: mod_base = OTHER; note = 2'-deoxyadenosine-3'-phosphorothioate
  modified_base 14: mod_base = OTHER; note = 5'-methyl-deoxycytidine-3'-phosphorothioate
  modified_base 15: mod_base = OTHER; note = 2'-deoxythymidine-3'-phosphorothioate
  modified_base 16: mod_base = OTHER; note = 2'-O-methyluridine-3'-phosphorothioate
  modified_base 17: mod_base = OTHER; note = 2'-O-methyluridine-3'-phosphorothioate
  modified_base 18: mod_base = OTHER; note = 2'-O-methylcytidine-3'-phosphorothioate
  modified_base 19: mod_base = OTHER; note = 2'-O-methyladenosine-3'-phosphorothioate
  modified_base 20: mod_base = OTHER; note = 2'-O-methylcytidine-3'-phosphate
  misc_feature 1..5: note = RNA
  misc_feature 6..15: note = DNA
  misc_feature 16..20: note = RNA
gtcttgtcgatgactttcac

SEQ ID NO: 4253 - DNA, 20 bp, synthetic construct
  source 1..20: mol_type = other DNA; note = Description of Artificial Sequence: Synthetic oligonucleotide; note = Description of Combined DNA/RNA Molecule: Synthetic oligonucleotide
  modified_base 1: mod_base = OTHER; note = 2'-O-methyluridine-3'-phosphorothioate
  modified_base 2: mod_base = OTHER; note = 2'-O-methyluridine-3'-phosphorothioate
  modified_base 3: mod_base = OTHER; note = 2'-O-methyluridine-3'-phosphorothioate
  modified_base 4: mod_base = OTHER; note = 2'-O-methylcytidine-3'-phosphorothioate
  modified_base 5: mod_base = OTHER; note = 2'-O-methylcytidine-3'-phosphorothioate
  modified_base 6: mod_base = OTHER; note = 2'-deoxythymidine-3'-phosphorothioate
  modified_base 7: mod_base = OTHER; note = 5'-methyl-deoxycytidine-3'-phosphorothioate
  modified_base 8: mod_base = OTHER; note = 2'-deoxyadenosine-3'-phosphorothioate
  modified_base 9: mod_base = OTHER; note = 5'-methyl-deoxycytidine-3'-phosphorothioate
  modified_base 10: mod_base = OTHER; note = 5'-methyl-deoxycytidine-3'-phosphorothioate
  modified_base 11: mod_base = OTHER; note = 2'-deoxyadenosine-3'-phosphorothioate
  modified_base 12: mod_base = OTHER; note = 2'-deoxyadenosine-3'-phosphorothioate
  modified_base 13: mod_base = OTHER; note = 2'-deoxythymidine-3'-phosphorothioate
  modified_base 14: mod_base = OTHER; note = 2'-deoxyguanosine-3'-phosphorothioate
  modified_base 15: mod_base = OTHER; note = 2'-deoxythymidine-3'-phosphorothioate
  modified_base 16: mod_base = OTHER; note = 2'-O-methylcytidine-3'-phosphorothioate
  modified_base 17: mod_base = OTHER; note = 2'-O-methyluridine-3'-phosphorothioate
  modified_base 18: mod_base = OTHER; note = 2'-O-methyluridine-3'-phosphorothioate
  modified_base 19: mod_base = OTHER; note = 2'-O-methylguanosine-3'-phosphorothioate
  modified_base 20: mod_base = OTHER; note = 2'-O-methyluridine-3'-phosphate
  misc_feature 1..5: note = RNA
  misc_feature 6..15: note = DNA
  misc_feature 16..20: note = RNA
tttcctcaccaatgtcttgt

SEQ ID NO: 4254 - DNA, 20 bp, synthetic construct
  source 1..20: mol_type = other DNA; note = Description of Artificial Sequence: Synthetic oligonucleotide
  modified_base 1: mod_base = OTHER; note = 2'-O-methylcytidine-3'-phosphorothioate
  modified_base 2: mod_base = OTHER; note = 2'-O-methyladenosine-3'-phosphorothioate
  modified_base 3: mod_base = OTHER; note = 2'-O-methyladenosine-3'-phosphorothioate
  modified_base 4: mod_base = OTHER; note = 2'-O-methyladenosine-3'-phosphorothioate
  modified_base 5: mod_base = OTHER; note = 2'-O-methylguanosine-3'-phosphorothioate
  modified_base 6: mod_base = OTHER; note = 2'-deoxyguanosine-3'-phosphorothioate
  modified_base 7: mod_base = OTHER; note = 2'-deoxyadenosine-3'-phosphorothioate
  modified_base 8: mod_base = OTHER; note = 2'-deoxythymidine-3'-phosphorothioate
  modified_base 9: mod_base = OTHER; note = 2'-deoxythymidine-3'-phosphorothioate
  modified_base 10: mod_base = OTHER; note = 2'-deoxythymidine-3'-phosphorothioate
  modified_base 11: mod_base = OTHER; note = 2'-deoxythymidine-3'-phosphorothioate
  modified_base 12: mod_base = OTHER; note = 2'-deoxythymidine-3'-phosphorothioate
  modified_base 13: mod_base = OTHER; note = 5'-methyl-deoxycytidine-3'-phosphorothioate
  modified_base 14: mod_base = OTHER; note = 5'-methyl-deoxycytidine-3'-phosphorothioate
  modified_base 15: mod_base = OTHER; note = 2'-deoxythymidine-3'-phosphorothioate
  modified_base 16: mod_base = OTHER; note = 2'-O-methylcytidine-3'-phosphorothioate
  modified_base 17: mod_base = OTHER; note = 2'-O-methyladenosine-3'-phosphorothioate
  modified_base 18: mod_base = OTHER; note = 2'-O-methylcytidine-3'-phosphorothioate
  modified_base 19: mod_base = OTHER; note = 2'-O-methylcytidine-3'-phosphorothioate
  modified_base 20: mod_base = OTHER; note = 2'-O-methyladenosine-3'-phosphate
  misc_feature 1..5: note = RNA
  misc_feature 6..15: note = DNA
  misc_feature 16..20: note = RNA
caaaggatttttcctcacca

SEQ ID NO: 4255 - DNA, 20 bp, synthetic construct
  source 1..20: mol_type = other DNA; note = Description of Artificial Sequence: Synthetic oligonucleotide; note = Description of Combined DNA/RNA Molecule: Synthetic oligonucleotide
  modified_base 1: mod_base = OTHER; note = 2'-O-methyluridine-3'-phosphorothioate
  modified_base 2: mod_base = OTHER; note = 2'-O-methyluridine-3'-phosphorothioate
  modified_base 3: mod_base = OTHER; note = 2'-O-methylguanosine-3'-phosphorothioate
  modified_base 4: mod_base = OTHER; note = 2'-O-methylguanosine-3'-phosphorothioate
  modified_base 5: mod_base = OTHER; note = 2'-O-methyladenosine-3'-phosphorothioate
  modified_base 6: mod_base = OTHER; note = 2'-deoxyadenosine-3'-phosphorothioate
  modified_base 7: mod_base = OTHER; note = 2'-deoxyadenosine-3'-phosphorothioate
  modified_base 8: mod_base = OTHER; note = 5'-methyl-deoxycytidine-3'-phosphorothioate
  modified_base 9: mod_base = OTHER; note = 2'-deoxyguanosine-3'-phosphorothioate
  modified_base 10: mod_base = OTHER; note = 2'-deoxyguanosine-3'-phosphorothioate
  modified_base 11: mod_base = OTHER; note = 5'-methyl-deoxycytidine-3'-phosphorothioate
  modified_base 12: mod_base = OTHER; note = 5'-methyl-deoxycytidine-3'-phosphorothioate
  modified_base 13: mod_base = OTHER; note = 2'-deoxyadenosine-3'-phosphorothioate
  modified_base 14: mod_base = OTHER; note = 2'-deoxyadenosine-3'-phosphorothioate
  modified_base 15: mod_base = OTHER; note = 2'-deoxyadenosine-3'-phosphorothioate
  modified_base 16: mod_base = OTHER; note = 2'-O-methylguanosine-3'-phosphorothioate
  modified_base 17: mod_base = OTHER; note = 2'-O-methylguanosine-3'-phosphorothioate
  modified_base 18: mod_base = OTHER; note = 2'-O-methyladenosine-3'-phosphorothioate
  modified_base 19: mod_base = OTHER; note = 2'-O-methyluridine-3'-phosphorothioate
  modified_base 20: mod_base = OTHER; note = 2'-O-methyluridine-3'-phosphate
  misc_feature 1..5: note = RNA
  misc_feature 6..15: note = DNA
  misc_feature 16..20: note = RNA
ttggaaacggccaaaggatt

SEQ ID NO: 4256 - DNA, 20 bp, synthetic construct
  source 1..20: mol_type = other DNA; note = Description of Artificial Sequence: Synthetic oligonucleotide; note = Description of Combined DNA/RNA Molecule: Synthetic oligonucleotide
  modified_base 1: mod_base = OTHER; note = 2'-O-methylguanosine-3'-phosphorothioate
  modified_base 2: mod_base = OTHER; note = 2'-O-methylcytidine-3'-phosphorothioate
  modified_base 3: mod_base = OTHER; note = 2'-O-methyladenosine-3'-phosphorothioate
  modified_base 4: mod_base = OTHER; note = 2'-O-methylcytidine-3'-phosphorothioate
  modified_base 5: mod_base = OTHER; note = 2'-O-methyluridine-3'-phosphorothioate
  modified_base 6: mod_base = OTHER; note = 2'-deoxyguanosine-3'-phosphorothioate
  modified_base 7: mod_base = OTHER; note = 2'-deoxythymidine-3'-phosphorothioate
  modified_base 8: mod_base = OTHER; note = 5'-methyl-deoxycytidine-3'-phosphorothioate
  modified_base 9: mod_base = OTHER; note = 2'-deoxyadenosine-3'-phosphorothioate
  modified_base 10: mod_base = OTHER; note = 2'-deoxyguanosine-3'-phosphorothioate
  modified_base 11: mod_base = OTHER; note = 2'-deoxyadenosine-3'-phosphorothioate
  modified_base 12: mod_base = OTHER; note = 2'-deoxythymidine-3'-phosphorothioate
  modified_base 13: mod_base = OTHER; note = 5'-methyl-deoxycytidine-3'-phosphorothioate
  modified_base 14: mod_base = OTHER; note = 2'-deoxythymidine-3'-phosphorothioate
  modified_base 15: mod_base = OTHER; note = 2'-deoxythymidine-3'-phosphorothioate
  modified_base 16: mod_base = OTHER; note = 2'-O-methylguanosine-3'-phosphorothioate
  modified_base 17: mod_base = OTHER; note = 2'-O-methylguanosine-3'-phosphorothioate
  modified_base 18: mod_base = OTHER; note = 2'-O-methyladenosine-3'-phosphorothioate
  modified_base 19: mod_base = OTHER; note = 2'-O-methyladenosine-3'-phosphorothioate
  modified_base 20: mod_base = OTHER; note = 2'-O-methyladenosine-3'-phosphate
  misc_feature 1..5: note = RNA
  misc_feature 6..15: note = DNA
  misc_feature 16..20: note = RNA
gcactgtcagatcttggaaa

SEQ ID NO: 4257 - DNA, 20 bp, synthetic construct
  source 1..20: mol_type = other DNA; note = Description of Artificial Sequence: Synthetic oligonucleotide; note = Description of Combined DNA/RNA Molecule: Synthetic oligonucleotide
  modified_base 1: mod_base = OTHER; note = 2'-O-methyladenosine-3'-phosphorothioate
  modified_base 2: mod_base = OTHER; note = 2'-O-methyladenosine-3'-phosphorothioate
  modified_base 3: mod_base = OTHER; note = 2'-O-methyladenosine-3'-phosphorothioate
  modified_base 4: mod_base = OTHER; note = 2'-O-methyluridine-3'-phosphorothioate
  modified_base 5: mod_base = OTHER; note = 2'-O-methyladenosine-3'-phosphorothioate
  modified_base 6: mod_base = OTHER; note = 2'-deoxythymidine-3'-phosphorothioate
  modified_base 7: mod_base = OTHER; note = 2'-deoxythymidine-3'-phosphorothioate
  modified_base 8: mod_base = OTHER; note = 2'-deoxyguanosine-3'-phosphorothioate
  modified_base 9: mod_base = OTHER; note = 2'-deoxythymidine-3'-phosphorothioate
  modified_base 10: mod_base = OTHER; note = 2'-deoxyguanosine-3'-phosphorothioate
  modified_base 11: mod_base = OTHER; note = 5'-methyl-deoxycytidine-3'-phosphorothioate
  modified_base 12: mod_base = OTHER; note = 2'-deoxyadenosine-3'-phosphorothioate
  modified_base 13: mod_base = OTHER; note = 5'-methyl-deoxycytidine-3'-phosphorothioate
  modified_base 14: mod_base = OTHER; note = 2'-deoxythymidine-3'-phosphorothioate
  modified_base 15: mod_base = OTHER; note = 2'-deoxyguanosine-3'-phosphorothioate
  modified_base 16: mod_base = OTHER; note = 2'-O-methyluridine-3'-phosphorothioate
  modified_base 17: mod_base = OTHER; note = 2'-O-methylcytidine-3'-phosphorothioate
  modified_base 18: mod_base = OTHER; note = 2'-O-methyladenosine-3'-phosphorothioate
  modified_base 19: mod_base = OTHER; note = 2'-O-methylguanosine-3'-phosphorothioate
  modified_base 20: mod_base = OTHER; note = 2'-O-methyladenosine-3'-phosphate
  misc_feature 1..5: note = RNA
  misc_feature 6..15: note = DNA
  misc_feature 16..20: note = RNA
aaatattgtgcactgtcaga

SEQ ID NO: 4258 - DNA, 20 bp, synthetic construct
  source 1..20: mol_type = other DNA; note = Description of Artificial Sequence: Synthetic oligonucleotide; note = Description of Combined DNA/RNA Molecule: Synthetic oligonucleotide
  modified_base 1: mod_base = OTHER; note = 2'-O-methyluridine-3'-phosphorothioate
  modified_base 2: mod_base = OTHER; note = 2'-O-methyladenosine-3'-phosphorothioate
  modified_base 3: mod_base = OTHER; note = 2'-O-methylcytidine-3'-phosphorothioate
  modified_base 4: mod_base = OTHER; note = 2'-O-methyladenosine-3'-phosphorothioate
  modified_base 5: mod_base = OTHER; note = 2'-O-methylguanosine-3'-phosphorothioate
  modified_base 6: mod_base = OTHER; note = 2'-deoxyadenosine-3'-phosphorothioate
  modified_base 7: mod_base = OTHER; note = 2'-deoxythymidine-3'-phosphorothioate
  modified_base 8: mod_base = OTHER; note = 2'-deoxyguanosine-3'-phosphorothioate
  modified_base 9: mod_base = OTHER; note = 2'-deoxyguanosine-3'-phosphorothioate
  modified_base 10: mod_base = OTHER; note = 2'-deoxyguanosine-3'-phosphorothioate
  modified_base 11: mod_base = OTHER; note = 2'-deoxyadenosine-3'-phosphorothioate
  modified_base 12: mod_base = OTHER; note = 2'-deoxyadenosine-3'-phosphorothioate
  modified_base 13: mod_base = OTHER; note = 2'-deoxyadenosine-3'-phosphorothioate
  modified_base 14: mod_base = OTHER; note = 2'-deoxyadenosine-3'-phosphorothioate
  modified_base 15: mod_base = OTHER; note = 2'-deoxythymidine-3'-phosphorothioate
  modified_base 16: mod_base = OTHER; note = 2'-O-methyladenosine-3'-phosphorothioate
  modified_base 17: mod_base = OTHER; note = 2'-O-methyluridine-3'-phosphorothioate
  modified_base 18: mod_base = OTHER; note = 2'-O-methyluridine-3'-phosphorothioate
  modified_base 19: mod_base = OTHER; note = 2'-O-methylguanosine-3'-phosphorothioate
  modified_base 20: mod_base = OTHER; note = 2'-O-methyluridine-3'-phosphate
  misc_feature 1..5: note = RNA
  misc_feature 6..15: note = DNA
  misc_feature 16..20: note = RNA
tacagatgggaaaatattgt

SEQ ID NO: 4259 - DNA, 20 bp, synthetic construct
  source 1..20: mol_type = other DNA; note = Description of Artificial Sequence: Synthetic oligonucleotide; note = Description of Combined DNA/RNA Molecule: Synthetic oligonucleotide
  modified_base 1: mod_base = OTHER; note = 2'-O-methyluridine-3'-phosphorothioate
  modified_base 2: mod_base = OTHER; note = 2'-O-methylguanosine-3'-phosphorothioate
  modified_base 3: mod_base = OTHER; note = 2'-O-methyladenosine-3'-phosphorothioate
  modified_base 4: mod_base = OTHER; note = 2'-O-methyladenosine-3'-phosphorothioate
  modified_base 5: mod_base = OTHER; note = 2'-O-methyladenosine-3'-phosphorothioate
  modified_base 6: mod_base = OTHER; note = 2'-deoxyadenosine-3'-phosphorothioate
  modified_base 7: mod_base = OTHER; note = 2'-deoxyadenosine-3'-phosphorothioate
  modified_base 8: mod_base = OTHER; note = 2'-deoxyadenosine-3'-phosphorothioate
  modified_base 9: mod_base = OTHER; note = 2'-deoxyadenosine-3'-phosphorothioate
  modified_base 10: mod_base = OTHER; note = 2'-deoxyadenosine-3'-phosphorothioate
  modified_base 11: mod_base = OTHER; note = 2'-deoxythymidine-3'-phosphorothioate
  modified_base 12: mod_base = OTHER; note = 2'-deoxyadenosine-3'-phosphorothioate
  modified_base 13: mod_base = OTHER; note = 2'-deoxyadenosine-3'-phosphorothioate
  modified_base 14: mod_base = OTHER; note = 2'-deoxythymidine-3'-phosphorothioate
  modified_base 15: mod_base = OTHER; note = 2'-deoxyadenosine-3'-phosphorothioate
  modified_base 16: mod_base = OTHER; note = 2'-O-methylcytidine-3'-phosphorothioate
  modified_base 17: mod_base = OTHER; note = 2'-O-methyladenosine-3'-phosphorothioate
  modified_base 18: mod_base = OTHER; note = 2'-O-methylguanosine-3'-phosphorothioate
  modified_base 19: mod_base = OTHER; note = 2'-O-methyladenosine-3'-phosphorothioate
  modified_base 20: mod_base = OTHER; note = 2'-O-methyluridine-3'-phosphate
  misc_feature 1..5: note = RNA
  misc_feature 6..15: note = DNA
  misc_feature 16..20: note = RNA
tgaaaaaaaataatacagat

SEQ ID NO: 4260 - DNA, 20 bp, synthetic construct
  source 1..20: mol_type = other DNA; note = Description of Artificial Sequence: Synthetic oligonucleotide; note = Description of Combined DNA/RNA Molecule: Synthetic oligonucleotide
  modified_base 1: mod_base = OTHER; note = 2'-O-methyluridine-3'-phosphorothioate
  modified_base 2: mod_base = OTHER; note = 2'-O-methyladenosine-3'-phosphorothioate
  modified_base 3: mod_base = OTHER; note = 2'-O-methyladenosine-3'-phosphorothioate
  modified_base 4: mod_base = OTHER; note = 2'-O-methyluridine-3'-phosphorothioate
  modified_base 5: mod_base = OTHER; note = 2'-O-methyladenosine-3'-phosphorothioate
  modified_base 6: mod_base = OTHER; note = 5'-methyl-deoxycytidine-3'-phosphorothioate
  modified_base 7: mod_base = OTHER; note = 2'-deoxyadenosine-3'-phosphorothioate
  modified_base 8: mod_base = OTHER; note = 2'-deoxythymidine-3'-phosphorothioate
  modified_base 9: mod_base = OTHER; note = 2'-deoxyguanosine-3'-phosphorothioate
  modified_base 10: mod_base = OTHER; note = 5'-methyl-deoxycytidine-3'-phosphorothioate
  modified_base 11: mod_base = OTHER; note = 2'-deoxythymidine-3'-phosphorothioate
  modified_base 12: mod_base = OTHER; note = 2'-deoxyguanosine-3'-phosphorothioate
  modified_base 13: mod_base = OTHER; note = 2'-deoxyadenosine-3'-phosphorothioate
  modified_base 14: mod_base = OTHER; note = 2'-deoxyadenosine-3'-phosphorothioate
  modified_base 15: mod_base = OTHER; note = 2'-deoxyadenosine-3'-phosphorothioate
  modified_base 16: mod_base = OTHER; note = 2'-O-methyladenosine-3'-phosphorothioate
  modified_base 17: mod_base = OTHER; note = 2'-O-methyladenosine-3'-phosphorothioate
  modified_base 18: mod_base = OTHER; note = 2'-O-methyladenosine-3'-phosphorothioate
  modified_base 19: mod_base = OTHER; note = 2'-O-methyladenosine-3'-phosphorothioate
  modified_base 20: mod_base = OTHER; note = 2'-O-methyladenosine-3'-phosphate
  misc_feature 1..5: note = RNA
  misc_feature 6..15: note = DNA
  misc_feature 16..20: note = RNA
taatacatgctgaaaaaaaa

SEQ ID NO: 4261 - DNA, 20 bp, synthetic construct
  source 1..20: mol_type = other DNA; note = Description of Artificial Sequence: Synthetic oligonucleotide; note = Description of Combined DNA/RNA Molecule: Synthetic oligonucleotide
  modified_base 1: mod_base = OTHER; note = 2'-O-methylcytidine-3'-phosphorothioate
  modified_base 2: mod_base = OTHER; note = 2'-O-methyluridine-3'-phosphorothioate
  modified_base 3: mod_base = OTHER; note = 2'-O-methylcytidine-3'-phosphorothioate
  modified_base 4: mod_base = OTHER; note = 2'-O-methyluridine-3'-phosphorothioate
  modified_base 5: mod_base = OTHER; note = 2'-O-methyluridine-3'-phosphorothioate
  modified_base 6: mod_base = OTHER; note = 2'-deoxythymidine-3'-phosphorothioate
  modified_base 7: mod_base = OTHER; note = 2'-deoxyguanosine-3'-phosphorothioate
  modified_base 8: mod_base = OTHER; note = 2'-deoxythymidine-3'-phosphorothioate
  modified_base 9: mod_base = OTHER; note = 5'-methyl-deoxycytidine-3'-phosphorothioate
  modified_base 10: mod_base = OTHER; note = 2'-deoxyadenosine-3'-phosphorothioate
  modified_base 11: mod_base = OTHER; note = 2'-deoxyadenosine-3'-phosphorothioate
  modified_base 12: mod_base = OTHER; note = 2'-deoxyguanosine-3'-phosphorothioate
  modified_base 13: mod_base = OTHER; note = 2'-deoxythymidine-3'-phosphorothioate
  modified_base 14: mod_base = OTHER; note = 2'-deoxyadenosine-3'-phosphorothioate
  modified_base 15: mod_base = OTHER; note = 2'-deoxyadenosine-3'-phosphorothioate
  modified_base 16: mod_base = OTHER; note = 2'-O-methyluridine-3'-phosphorothioate
  modified_base 17: mod_base = OTHER; note = 2'-O-methyladenosine-3'-phosphorothioate
  modified_base 18: mod_base = OTHER; note = 2'-O-methylcytidine-3'-phosphorothioate
  modified_base 19: mod_base = OTHER; note = 2'-O-methyladenosine-3'-phosphorothioate
  modified_base 20: mod_base = OTHER; note = 2'-O-methyluridine-3'-phosphate
  misc_feature 1..5: note = RNA
  misc_feature 6..15: note = DNA
  misc_feature 16..20: note = RNA
ctctttgtcaagtaatacat

SEQ ID NO: 4262 - DNA, 20 bp, synthetic construct
  source 1..20: mol_type = other DNA; note = Description of Artificial Sequence: Synthetic oligonucleotide; note = Description of Combined DNA/RNA Molecule: Synthetic oligonucleotide
  modified_base 1: mod_base = OTHER; note = 2'-O-methylguanosine-3'-phosphorothioate
  modified_base 2: mod_base = OTHER; note = 2'-O-methylcytidine-3'-phosphorothioate
  modified_base 3: mod_base = OTHER; note = 2'-O-methyladenosine-3'-phosphorothioate
  modified_base 4: mod_base = OTHER; note = 2'-O-methylcytidine-3'-phosphorothioate
  modified_base 5: mod_base = OTHER; note = 2'-O-methyladenosine-3'-phosphorothioate
  modified_base 6: mod_base = OTHER; note = 2'-deoxyguanosine-3'-phosphorothioate
  modified_base 7: mod_base = OTHER; note = 2'-deoxythymidine-3'-phosphorothioate
  modified_base 8: mod_base = OTHER; note = 2'-deoxyguanosine-3'-phosphorothioate
  modified_base 9: mod_base = OTHER; note = 2'-deoxythymidine-3'-phosphorothioate
  modified_base 10: mod_base = OTHER; note = 5'-methyl-deoxycytidine-3'-phosphorothioate
  modified_base 11: mod_base = OTHER; note = 2'-deoxythymidine-3'-phosphorothioate
  modified_base 12: mod_base = OTHER; note = 5'-methyl-deoxycytidine-3'-phosphorothioate
  modified_base 13: mod_base = OTHER; note = 2'-deoxythymidine-3'-phosphorothioate
  modified_base 14: mod_base = OTHER; note = 2'-deoxythymidine-3'-phosphorothioate
  modified_base 15: mod_base = OTHER; note = 2'-deoxythymidine-3'-phosphorothioate
  modified_base 16: mod_base = OTHER; note = 2'-O-methylguanosine-3'-phosphorothioate
  modified_base 17: mod_base = OTHER; note = 2'-O-methyluridine-3'-phosphorothioate
  modified_base 18: mod_base = OTHER; note = 2'-O-methylcytidine-3'-phosphorothioate
  modified_base 19: mod_base = OTHER; note = 2'-O-methyladenosine-3'-phosphorothioate
  modified_base 20: mod_base = OTHER; note = 2'-O-methyladenosine-3'-phosphate
  misc_feature 1..5: note = RNA
  misc_feature 6..15: note = DNA
  misc_feature 16..20: note = RNA
gcacagtgtctctttgtcaa

SEQ ID NO: 4263 - DNA, 20 bp, synthetic construct
  source 1..20: mol_type = other DNA; note = Description of Artificial Sequence: Synthetic oligonucleotide; note = Description of Combined DNA/RNA Molecule: Synthetic oligonucleotide
  modified_base 1: mod_base = OTHER; note = 2'-O-methyluridine-3'-phosphorothioate
  modified_base 2: mod_base = OTHER; note = 2'-O-methylguanosine-3'-phosphorothioate
  modified_base 3: mod_base = OTHER; note = 2'-O-methylguanosine-3'-phosphorothioate
  modified_base 4: mod_base = OTHER; note = 2'-O-methyluridine-3'-phosphorothioate
  modified_base 5: mod_base = OTHER; note = 2'-O-methylcytidine-3'-phosphorothioate
  modified_base 6: mod_base = OTHER; note = 2'-deoxyadenosine-3'-phosphorothioate
  modified_base 7: mod_base = OTHER; note = 5'-methyl-deoxycytidine-3'-phosphorothioate
  modified_base 8: mod_base = OTHER; note = 5'-methyl-deoxycytidine-3'-phosphorothioate
  modified_base 9: mod_base = OTHER; note = 5'-methyl-deoxycytidine-3'-phosphorothioate
  modified_base 10: mod_base = OTHER; note = 2'-deoxythymidine-3'-phosphorothioate
  modified_base 11: mod_base = OTHER; note = 5'-methyl-deoxycytidine-3'-phosphorothioate
  modified_base 12: mod_base = OTHER; note = 2'-deoxythymidine-3'-phosphorothioate
  modified_base 13: mod_base = OTHER; note = 2'-deoxyguanosine-3'-phosphorothioate
  modified_base 14: mod_base = OTHER; note = 5'-methyl-deoxycytidine-3'-phosphorothioate
  modified_base 15: mod_base = OTHER; note = 2'-deoxyadenosine-3'-phosphorothioate
  modified_base 16: mod_base = OTHER; note = 2'-O-methylcytidine-3'-phosphorothioate
  modified_base 17: mod_base = OTHER; note = 2'-O-methyladenosine-3'-phosphorothioate
  modified_base 18: mod_base = OTHER; note = 2'-O-methylguanosine-3'-phosphorothioate
  modified_base 19: mod_base = OTHER; note = 2'-O-methyluridine-3'-phosphorothioate
  modified_base 20: mod_base = OTHER; note = 2'-O-methylguanosine-3'-phosphate
  misc_feature 1..5: note = RNA
  misc_feature 6..15: note = DNA
  misc_feature 16..20: note = RNA
tggtcaccctctgcacagtg

SEQ ID NO: 4264 - DNA, 20 bp, synthetic construct
  source 1..20: mol_type = other DNA; note = Description of Artificial Sequence: Synthetic oligonucleotide; note = Description of Combined DNA/RNA Molecule: Synthetic oligonucleotide
  modified_base 1: mod_base = OTHER; note = 2'-O-methyluridine-3'-phosphorothioate
  modified_base 2: mod_base = OTHER; note = 2'-O-methyluridine-3'-phosphorothioate
  modified_base 3: mod_base = OTHER; note = 2'-O-methyladenosine-3'-phosphorothioate
  modified_base 4: mod_base = OTHER; note = 2'-O-methylcytidine-3'-phosphorothioate
  modified_base 5: mod_base = OTHER; note = 2'-O-methyladenosine-3'-phosphorothioate
  modified_base 6: mod_base = OTHER; note = 2'-deoxyguanosine-3'-phosphorothioate
  modified_base 7: mod_base = OTHER; note = 2'-deoxyadenosine-3'-phosphorothioate
  modified_base 8: mod_base = OTHER; note = 5'-methyl-deoxycytidine-3'-phosphorothioate
  modified_base 9: mod_base = OTHER; note = 2'-deoxythymidine-3'-phosphorothioate
  modified_base 10: mod_base = OTHER; note = 2'-deoxyguanosine-3'-phosphorothioate
  modified_base 11: mod_base = OTHER; note = 2'-deoxythymidine-3'-phosphorothioate
  modified_base 12: mod_base = OTHER; note = 2'-deoxyguanosine-3'-phosphorothioate
  modified_base 13: mod_base = OTHER; note = 2'-deoxyguanosine-3'-phosphorothioate
  modified_base 14: mod_base = OTHER; note = 2'-deoxythymidine-3'-phosphorothioate
  modified_base 15: mod_base = OTHER; note = 5'-methyl-deoxycytidine-3'-phosphorothioate
  modified_base 16: mod_base = OTHER; note = 2'-O-methyladenosine-3'-phosphorothioate
  modified_base 17: mod_base = OTHER; note = 2'-O-methylcytidine-3'-phosphorothioate
  modified_base 18: mod_base = OTHER; note = 2'-O-methylcytidine-3'-phosphorothioate
  modified_base 19: mod_base = OTHER; note = 2'-O-methylcytidine-3'-phosphorothioate
  modified_base 20: mod_base = OTHER; note = 2'-O-methyluridine-3'-phosphate
  misc_feature 1..5: note = RNA
  misc_feature 6..15: note = DNA
  misc_feature 16..20: note = RNA
ttacagactgtggtcaccct

SEQ ID NO: 4265 - DNA, 20 bp, synthetic construct
  source 1..20: mol_type = other DNA; note = Description of Artificial Sequence: Synthetic oligonucleotide; note = Description of Combined DNA/RNA Molecule: Synthetic oligonucleotide
  modified_base 1: mod_base = OTHER; note = 2'-O-methyluridine-3'-phosphorothioate
  modified_base 2: mod_base = OTHER; note = 2'-O-methyluridine-3'-phosphorothioate
  modified_base 3: mod_base = OTHER; note = 2'-O-methylguanosine-3'-phosphorothioate
  modified_base 4: mod_base = OTHER; note = 2'-O-methyladenosine-3'-phosphorothioate
  modified_base 5: mod_base = OTHER; note = 2'-O-methyladenosine-3'-phosphorothioate
  modified_base 6: mod_base = OTHER; note = 2'-deoxyguanosine-3'-phosphorothioate
  modified_base 7: mod_base = OTHER; note = 2'-deoxythymidine-3'-phosphorothioate
  modified_base 8: mod_base = OTHER; note = 2'-deoxyguanosine-3'-phosphorothioate
  modified_base 9: mod_base = OTHER; note = 2'-deoxyguanosine-3'-phosphorothioate
  modified_base 10: mod_base = OTHER; note = 2'-deoxyguanosine-3'-phosphorothioate
  modified_base 11: mod_base = OTHER; note = 2'-deoxyguanosine-3'-phosphorothioate
  modified_base 12: mod_base = OTHER; note = 2'-deoxyadenosine-3'-phosphorothioate
  modified_base 13: mod_base = OTHER; note = 2'-deoxyadenosine-3'-phosphorothioate
  modified_base 14: mod_base = OTHER; note = 2'-deoxythymidine-3'-phosphorothioate
  modified_base 15: mod_base = OTHER; note = 2'-deoxythymidine-3'-phosphorothioate
  modified_base 16: mod_base = OTHER; note = 2'-O-methyladenosine-3'-phosphorothioate
  modified_base 17: mod_base = OTHER; note = 2'-O-methylcytidine-3'-phosphorothioate
  modified_base 18: mod_base = OTHER; note = 2'-O-methyladenosine-3'-phosphorothioate
  modified_base 19: mod_base = OTHER; note = 2'-O-methylguanosine-3'-phosphorothioate
  modified_base 20: mod_base = OTHER; note = 2'-O-methyladenosine-3'-phosphate
  misc_feature 1..5: note = RNA
  misc_feature 6..15: note = DNA
  misc_feature 16..20: note = RNA
ttgaagtggggaattacaga

SEQ ID NO: 4266 - DNA, 20 bp, synthetic construct
  source 1..20: mol_type = other DNA; note = Description of Artificial Sequence: Synthetic oligonucleotide; note = Description of Combined DNA/RNA Molecule: Synthetic oligonucleotide
  modified_base 1: mod_base = OTHER; note = 2'-O-methylcytidine-3'-phosphorothioate
  modified_base 2: mod_base = OTHER; note = 2'-O-methylcytidine-3'-phosphorothioate
  modified_base 3: mod_base = OTHER; note = 2'-O-methylcytidine-3'-phosphorothioate
  modified_base 4: mod_base = OTHER; note = 2'-O-methyluridine-3'-phosphorothioate
  modified_base 5: mod_base = OTHER; note = 2'-O-methyluridine-3'-phosphorothioate
  modified_base 6: mod_base = OTHER; note = 2'-deoxythymidine-3'-phosphorothioate
  modified_base 7: mod_base = OTHER; note = 2'-deoxyguanosine-3'-phosphorothioate
  modified_base 8: mod_base = OTHER; note = 2'-deoxythymidine-3'-phosphorothioate
  modified_base 9: mod_base = OTHER; note = 2'-deoxyadenosine-3'-phosphorothioate
  modified_base 10: mod_base = OTHER; note = 2'-deoxythymidine-3'-phosphorothioate
  modified_base 11: mod_base = OTHER; note = 2'-deoxythymidine-3'-phosphorothioate
  modified_base 12: mod_base = OTHER; note = 2'-deoxyguanosine-3'-phosphorothioate
  modified_base 13: mod_base = OTHER; note = 2'-deoxyadenosine-3'-phosphorothioate
  modified_base 14: mod_base = OTHER; note = 2'-deoxyadenosine-3'-phosphorothioate
  modified_base 15: mod_base = OTHER; note = 2'-deoxyguanosine-3'-phosphorothioate
  modified_base 16: mod_base = OTHER; note = 2'-O-methyluridine-3'-phosphorothioate
  modified_base 17: mod_base = OTHER; note = 2'-O-methylguanosine-3'-phosphorothioate
  modified_base 18: mod_base = OTHER; note = 2'-O-methylguanosine-3'-phosphorothioate
  modified_base 19: mod_base = OTHER; note = 2'-O-methylguanosine-3'-phosphorothioate
  modified_base 20: mod_base = OTHER; note = 2'-O-methylguanosine-3'-phosphate
  misc_feature 1..5: note = RNA
  misc_feature 6..15: note = DNA
  misc_feature 16..20: note = RNA
ccctttgtattgaagtgggg

SEQ ID NO: 4267 - DNA, 20 bp, synthetic construct
  source 1..20: mol_type = other DNA; note = Description of Artificial Sequence: Synthetic oligonucleotide; note = Description of Combined DNA/RNA Molecule: Synthetic oligonucleotide
  modified_base 1: mod_base = OTHER; note = 2'-O-methyladenosine-3'-phosphorothioate
  modified_base 2: mod_base = OTHER; note = 2'-O-methyladenosine-3'-phosphorothioate
  modified_base 3: mod_base = OTHER; note = 2'-O-methyladenosine-3'-phosphorothioate
  modified_base 4: mod_base = OTHER; note = 2'-O-methylguanosine-3'-phosphorothioate
  modified_base 5: mod_base = OTHER; note = 2'-O-methyladenosine-3'-phosphorothioate
  modified_base 6: mod_base = OTHER; note = 2'-deoxyadenosine-3'-phosphorothioate
  modified_base 7: mod_base = OTHER; note = 5'-methyl-deoxycytidine-3'-phosphorothioate
  modified_base 8: mod_base = OTHER; note = 2'-deoxyguanosine-3'-phosphorothioate
  modified_base 9: mod_base = OTHER; note = 2'-deoxyadenosine-3'-phosphorothioate
  modified_base 10: mod_base = OTHER; note = 5'-methyl-deoxycytidine-3'-phosphorothioate
  modified_base 11: mod_base = OTHER; note = 2'-deoxyadenosine-3'-phosphorothioate
  modified_base 12: mod_base = OTHER; note = 5'-methyl-deoxycytidine-3'-phosphorothioate
  modified_base 13: mod_base = OTHER; note = 5'-methyl-deoxycytidine-3'-phosphorothioate
  modified_base 14: mod_base = OTHER; note = 5'-methyl-deoxycytidine-3'-phosphorothioate
  modified_base 15: mod_base = OTHER; note = 2'-deoxythymidine-3'-phosphorothioate
  modified_base 16: mod_base = OTHER; note = 2'-O-methyluridine-3'-phosphorothioate
  modified_base 17: mod_base = OTHER; note = 2'-O-methyluridine-3'-phosphorothioate
  modified_base 18: mod_base = OTHER; note = 2'-O-methylguanosine-3'-phosphorothioate
  modified_base 19: mod_base = OTHER; note = 2'-O-methyluridine-3'-phosphorothioate
  modified_base 20: mod_base = OTHER; note = 2'-O-methyladenosine-3'-phosphate
  misc_feature 1..5: note = RNA
  misc_feature 6..15: note = DNA
  misc_feature 16..20: note = RNA
aaagaacgacaccctttgta

SEQ ID NO: 4268 - DNA, 20 bp, synthetic construct
  source 1..20: mol_type = other DNA; note = Description of Artificial Sequence: Synthetic oligonucleotide; note = Description of Combined DNA/RNA Molecule: Synthetic oligonucleotide
  modified_base 1: mod_base = OTHER; note = 2'-O-methyluridine-3'-phosphorothioate
  modified_base 2: mod_base = OTHER; note = 2'-O-methyladenosine-3'-phosphorothioate
  modified_base 3: mod_base = OTHER; note = 2'-O-methyluridine-3'-phosphorothioate
  modified_base 4: mod_base = OTHER; note = 2'-O-methyluridine-3'-phosphorothioate
  modified_base 5: mod_base = OTHER; note = 2'-O-methyluridine-3'-phosphorothioate
  modified_base 6: mod_base = OTHER; note = 2'-deoxythymidine-3'-phosphorothioate
  modified_base 7: mod_base = OTHER; note = 2'-deoxyguanosine-3'-phosphorothioate
  modified_base 8: mod_base = OTHER; note = 2'-deoxythymidine-3'-phosphorothioate
  modified_base 9: mod_base = OTHER; note = 2'-deoxythymidine-3'-phosphorothioate
  modified_base 10: mod_base = OTHER; note = 2'-deoxyguanosine-3'-phosphorothioate
  modified_base 11: mod_base = OTHER; note = 2'-deoxyguanosine-3'-phosphorothioate
  modified_base 12: mod_base = OTHER; note = 2'-deoxyadenosine-3'-phosphorothioate
  modified_base 13: mod_base = OTHER; note = 2'-deoxyadenosine-3'-phosphorothioate
  modified_base 14: mod_base = OTHER; note = 2'-deoxyadenosine-3'-phosphorothioate
  modified_base 15: mod_base = OTHER; note = 2'-deoxyadenosine-3'-phosphorothioate
  modified_base 16: mod_base = OTHER; note = 2'-O-methylguanosine-3'-phosphorothioate
  modified_base 17: mod_base = OTHER; note = 2'-O-methyladenosine-3'-phosphorothioate
  modified_base 18: mod_base = OTHER; note = 2'-O-methyladenosine-3'-phosphorothioate
  modified_base 19: mod_base = OTHER; note = 2'-O-methylcytidine-3'-phosphorothioate
  modified_base 20: mod_base = OTHER; note = 2'-O-methylguanosine-3'-phosphate
  misc_feature 1..5: note = RNA
  misc_feature 6..15: note = DNA
  misc_feature 16..20: note = RNA
tattttgttggaaaagaacg

SEQ ID NO: 4269 - DNA, 20 bp, synthetic construct
  source 1..20: mol_type = other DNA; note = Description of Artificial Sequence: Synthetic oligonucleotide; note = Description of Combined DNA/RNA Molecule: Synthetic oligonucleotide
  modified_base 1: mod_base = OTHER; note = 2'-O-methyladenosine-3'-phosphorothioate
  modified_base 2: mod_base = OTHER; note = 2'-O-methyladenosine-3'-phosphorothioate
  modified_base 3: mod_base = OTHER; note = 2'-O-methylguanosine-3'-phosphorothioate
  modified_base 4: mod_base = OTHER; note = 2'-O-methylguanosine-3'-phosphorothioate
  modified_base 5: mod_base = OTHER; note = 2'-O-methylguanosine-3'-phosphorothioate
  modified_base 6: mod_base = OTHER; note = 2'-deoxyadenosine-3'-phosphorothioate
  modified_base 7: mod_base = OTHER; note = 2'-deoxythymidine-3'-phosphorothioate
  modified_base 8: mod_base = OTHER; note = 2'-deoxythymidine-3'-phosphorothioate
  modified_base 9: mod_base = OTHER; note = 2'-deoxyguanosine-3'-phosphorothioate
  modified_base 10: mod_base = OTHER; note = 5'-methyl-deoxycytidine-3'-phosphorothioate
  modified_base 11: mod_base = OTHER; note = 2'-deoxythymidine-3'-phosphorothioate
  modified_base 12: mod_base = OTHER; note = 2'-deoxyadenosine-3'-phosphorothioate
  modified_base 13: mod_base = OTHER; note = 2'-deoxythymidine-3'-phosphorothioate
  modified_base 14: mod_base = OTHER; note = 2'-deoxythymidine-3'-phosphorothioate
  modified_base 15: mod_base = OTHER; note = 2'-deoxythymidine-3'-phosphorothioate
  modified_base 16: mod_base = OTHER; note = 2'-O-methyluridine-3'-phosphorothioate
  modified_base 17: mod_base = OTHER; note = 2'-O-methylguanosine-3'-phosphorothioate
  modified_base 18: mod_base = OTHER; note = 2'-O-methyluridine-3'-phosphorothioate
  modified_base 19: mod_base = OTHER; note = 2'-O-methyluridine-3'-phosphorothioate
  modified_base 20: mod_base = OTHER; note = 2'-O-methylguanosine-3'-phosphate
  misc_feature 1..5: note = RNA
  misc_feature 6..15: note = DNA
  misc_feature 16..20: note = RNA
aagggattgctattttgttg

SEQ ID NO: 4270 - DNA, 20 bp, synthetic construct
  source 1..20: mol_type = other DNA; note = Description of Artificial Sequence: Synthetic oligonucleotide; note = Description of Combined DNA/RNA Molecule: Synthetic oligonucleotide
  modified_base 1: mod_base = OTHER; note = 2'-O-methylguanosine-3'-phosphorothioate
  modified_base 2: mod_base = OTHER; note = 2'-O-methylcytidine-3'-phosphorothioate
  modified_base 3: mod_base = OTHER; note = 2'-O-methyladenosine-3'-phosphorothioate
  modified_base 4: mod_base = OTHER; note = 2'-O-methyladenosine-3'-phosphorothioate
  modified_base 5: mod_base = OTHER; note = 2'-O-methyluridine-3'-phosphorothioate
  modified_base 6: mod_base = OTHER; note = 2'-deoxyguanosine-3'-phosphorothioate
  modified_base 7: mod_base = OTHER; note = 2'-deoxyadenosine-3'-phosphorothioate
  modified_base 8: mod_base = OTHER; note = 2'-deoxyadenosine-3'-phosphorothioate
  modified_base 9: mod_base = OTHER; note = 2'-deoxyadenosine-3'-phosphorothioate
  modified_base 10: mod_base = OTHER; note = 2'-deoxythymidine-3'-phosphorothioate
  modified_base 11: mod_base = OTHER; note = 2'-deoxyadenosine-3'-phosphorothioate
  modified_base 12: mod_base = OTHER; note = 2'-deoxyadenosine-3'-phosphorothioate
  modified_base 13: mod_base = OTHER; note = 2'-deoxyadenosine-3'-phosphorothioate
  modified_base 14: mod_base = OTHER; note = 2'-deoxyadenosine-3'-phosphorothioate
  modified_base 15: mod_base = OTHER; note = 2'-deoxyguanosine-3'-phosphorothioate
  modified_base 16: mod_base = OTHER; note = 2'-O-methylguanosine-3'-phosphorothioate
  modified_base 17: mod_base = OTHER; note = 2'-O-methylguanosine-3'-phosphorothioate
  modified_base 18: mod_base = OTHER; note = 2'-O-methyladenosine-3'-phosphorothioate
  modified_base 19: mod_base = OTHER; note = 2'-O-methyluridine-3'-phosphorothioate
  modified_base 20: mod_base = OTHER; note = 2'-O-methyluridine-3'-phosphate
  misc_feature 1..5: note = RNA
  misc_feature 6..15: note = DNA
  misc_feature 16..20: note = RNA
gcaatgaaataaaagggatt

SEQ ID NO: 4271 - DNA, 20 bp, synthetic construct
  source 1..20: mol_type = other DNA; note = Description of Artificial Sequence: Synthetic oligonucleotide; note = Description of Combined DNA/RNA Molecule: Synthetic oligonucleotide
  modified_base 1: mod_base = OTHER; note = 2'-O-methyladenosine-3'-phosphorothioate
  modified_base 2: mod_base = OTHER; note = 2'-O-methyladenosine-3'-phosphorothioate
  modified_base 3: mod_base = OTHER; note = 2'-O-methyladenosine-3'-phosphorothioate
  modified_base 4: mod_base = OTHER; note = 2'-O-methyladenosine-3'-phosphorothioate
  modified_base 5: mod_base = OTHER; note = 2'-O-methylguanosine-3'-phosphorothioate
  modified_base 6: mod_base = OTHER; note = 2'-deoxythymidine-3'-phosphorothioate
  modified_base 7: mod_base = OTHER; note = 5'-methyl-deoxycytidine-3'-phosphorothioate
  modified_base 8: mod_base = OTHER; note = 2'-deoxyadenosine-3'-phosphorothioate
  modified_base 9: mod_base = OTHER; note = 2'-deoxyadenosine-3'-phosphorothioate
  modified_base 10: mod_base = OTHER; note = 2'-deoxyadenosine-3'-phosphorothioate
  modified_base 11: mod_base = OTHER; note = 2'-deoxyadenosine-3'-phosphorothioate
  modified_base 12: mod_base = OTHER; note = 2'-deoxyguanosine-3'-phosphorothioate
  modified_base 13: mod_base = OTHER; note = 5'-methyl-deoxycytidine-3'-phosphorothioate
  modified_base 14: mod_base = OTHER; note = 2'-deoxyadenosine-3'-phosphorothioate
  modified_base 15: mod_base = OTHER; note = 2'-deoxyadenosine-3'-phosphorothioate
  modified_base 16: mod_base = OTHER; note = 2'-O-methyluridine-3'-phosphorothioate
  modified_base 17: mod_base = OTHER; note = 2'-O-methylguanosine-3'-phosphorothioate
  modified_base 18: mod_base = OTHER; note = 2'-O-methyladenosine-3'-phosphorothioate
  modified_base 19: mod_base = OTHER; note = 2'-O-methyladenosine-3'-phosphorothioate
  modified_base 20: mod_base = OTHER; note = 2'-O-methyladenosine-3'-phosphate
  misc_feature 1..5: note = RNA
  misc_feature 6..15: note = DNA
  misc_feature 16..20: note = RNA
aaaagtcaaaagcaatgaaa

SEQ ID NO: 4272 - DNA, 20 bp, synthetic construct
  source 1..20: mol_type = other DNA; note = Description of Artificial Sequence: Synthetic oligonucleotide; note = Description of Combined DNA/RNA Molecule: Synthetic oligonucleotide
  modified_base 1: mod_base = OTHER; note = 2'-O-methylguanosine-3'-phosphorothioate
  modified_base 2: mod_base = OTHER; note = 2'-O-methyladenosine-3'-phosphorothioate
  modified_base 3: mod_base = OTHER; note = 2'-O-methylcytidine-3'-phosphorothioate
  modified_base 4: mod_base = OTHER; note = 2'-O-methyladenosine-3'-phosphorothioate
  modified_base 5: mod_base = OTHER; note = 2'-O-methylcytidine-3'-phosphorothioate
  modified_base 6: mod_base = OTHER; note = 5'-methyl-deoxycytidine-3'-phosphorothioate
  modified_base 7: mod_base = OTHER; note = 5'-methyl-deoxycytidine-3'-phosphorothioate
  modified_base 8: mod_base = OTHER; note = 2'-deoxyadenosine-3'-phosphorothioate
  modified_base 9: mod_base = OTHER; note = 2'-deoxythymidine-3'-phosphorothioate
  modified_base 10: mod_base = OTHER; note = 2'-deoxythymidine-3'-phosphorothioate
  modified_base 11: mod_base = OTHER; note = 2'-deoxyguanosine-3'-phosphorothioate
  modified_base 12: mod_base = OTHER; note = 2'-deoxyadenosine-3'-phosphorothioate
  modified_base 13: mod_base = OTHER; note = 2'-deoxyadenosine-3'-phosphorothioate
  modified_base 14: mod_base = OTHER; note = 2'-deoxyadenosine-3'-phosphorothioate
  modified_base 15: mod_base = OTHER; note = 2'-deoxyadenosine-3'-phosphorothioate
  modified_base 16: mod_base = OTHER; note = 2'-O-methylguanosine-3'-phosphorothioate
  modified_base 17: mod_base = OTHER; note = 2'-O-methyluridine-3'-phosphorothioate
  modified_base 18: mod_base = OTHER; note = 2'-O-methylcytidine-3'-phosphorothioate
  modified_base 19: mod_base = OTHER; note = 2'-O-methyladenosine-3'-phosphorothioate
  modified_base 20: mod_base = OTHER; note = 2'-O-methyladenosine-3'-phosphate
  misc_feature 1..5: note = RNA
  misc_feature 6..15: note = DNA
  misc_feature 16..20: note = RNA
gacacccattgaaaagtcaa

SEQ ID NO: 4273 - DNA, 20 bp, synthetic construct
  source 1..20: mol_type = other DNA; note = Description of Artificial Sequence: Synthetic oligonucleotide
  modified_base 1: mod_base = OTHER; note = 2'-O-methyladenosine-3'-phosphorothioate
  modified_base 2: mod_base = OTHER; note = 2'-O-methyladenosine-3'-phosphorothioate
  modified_base 3: mod_base = OTHER; note = 2'-O-methyladenosine-3'-phosphorothioate
  modified_base 4: mod_base = OTHER; note = 2'-O-methylguanosine-3'-phosphorothioate
  modified_base 5: mod_base = OTHER; note = 2'-O-methylguanosine-3'-phosphorothioate
  modified_base 6: mod_base = OTHER; note = 2'-deoxythymidine-3'-phosphorothioate
  modified_base 7: mod_base = OTHER; note = 2'-deoxythymidine-3'-phosphorothioate
  modified_base 8: mod_base = OTHER; note = 5'-methyl-deoxycytidine-3'-phosphorothioate
  modified_base 9: mod_base = OTHER; note = 5'-methyl-deoxycytidine-3'-phosphorothioate
  modified_base 10: mod_base = OTHER; note = 2'-deoxythymidine-3'-phosphorothioate
  modified_base 11: mod_base = OTHER; note = 2'-deoxyadenosine-3'-phosphorothioate
  modified_base 12: mod_base = OTHER; note = 2'-deoxyguanosine-3'-phosphorothioate
  modified_base 13: mod_base = OTHER; note = 2'-deoxyguanosine-3'-phosphorothioate
  modified_base 14: mod_base = OTHER; note = 2'-deoxyadenosine-3'-phosphorothioate
  modified_base 15: mod_base = OTHER; note = 5'-methyl-deoxycytidine-3'-phosphorothioate
  modified_base 16: mod_base = OTHER; note = 2'-O-methyladenosine-3'-phosphorothioate
  modified_base 17: mod_base = OTHER; note = 2'-O-methylcytidine-3'-phosphorothioate
  modified_base 18: mod_base = OTHER; note = 2'-O-methylcytidine-3'-phosphorothioate
  modified_base 19: mod_base = OTHER; note = 2'-O-methylcytidine-3'-phosphorothioate
  modified_base 20: mod_base = OTHER; note = 2'-O-methyladenosine-3'-phosphate
  misc_feature 1..5: note = RNA
  misc_feature 6..15: note = DNA
  misc_feature 16..20: note = RNA
aaaggttcctaggacaccca

SEQ ID NO: 4274 - DNA, 20 bp, synthetic construct
  source 1..20: mol_type = other DNA; note = Description of Artificial Sequence: Synthetic oligonucleotide; note = Description of Combined DNA/RNA Molecule: Synthetic oligonucleotide
  modified_base 1: mod_base = OTHER; note = 2'-O-methyluridine-3'-phosphorothioate
  modified_base 2: mod_base = OTHER; note = 2'-O-methyluridine-3'-phosphorothioate
  modified_base 3: mod_base = OTHER; note = 2'-O-methyluridine-3'-phosphorothioate
  modified_base 4: mod_base = OTHER; note = 2'-O-methylcytidine-3'-phosphorothioate
  modified_base 5: mod_base = OTHER; note = 2'-O-methyluridine-3'-phosphorothioate
  modified_base 6: mod_base = OTHER; note = 2'-deoxythymidine-3'-phosphorothioate
  modified_base 7: mod_base = OTHER; note = 2'-deoxythymidine-3'-phosphorothioate
  modified_base 8: mod_base = OTHER; note = 5'-methyl-deoxycytidine-3'-phosphorothioate
  modified_base 9: mod_base = OTHER; note = 2'-deoxythymidine-3'-phosphorothioate
  modified_base 10: mod_base = OTHER; note = 2'-deoxyadenosine-3'-phosphorothioate
  modified_base 11: mod_base = OTHER; note = 2'-deoxyadenosine-3'-phosphorothioate
  modified_base 12: mod_base = OTHER; note = 2'-deoxyadenosine-3'-phosphorothioate
  modified_base 13: mod_base = OTHER; note = 2'-deoxyadenosine-3'-phosphorothioate
  modified_base 14: mod_base = OTHER; note = 2'-deoxyguanosine-3'-phosphorothioate
  modified_base 15: mod_base = OTHER; note = 2'-deoxyguanosine-3'-phosphorothioate
  modified_base 16: mod_base = OTHER; note = 2'-O-methyluridine-3'-phosphorothioate
  modified_base 17: mod_base = OTHER; note = 2'-O-methyluridine-3'-phosphorothioate
  modified_base 18: mod_base = OTHER; note = 2'-O-methylcytidine-3'-phosphorothioate
  modified_base 19: mod_base = OTHER; note = 2'-O-methylcytidine-3'-phosphorothioate
  modified_base 20: mod_base = OTHER; note = 2'-O-methyluridine-3'-phosphate
  misc_feature 1..5: note = RNA
  misc_feature 6..15: note = DNA
  misc_feature 16..20: note = RNA
tttctttctaaaaggttcct

SEQ ID NO: 4275 - DNA, 20 bp, synthetic construct
  source 1..20: mol_type = other DNA; note = Description of Artificial Sequence: Synthetic oligonucleotide; note = Description of Combined DNA/RNA Molecule: Synthetic oligonucleotide
  modified_base 1: mod_base = OTHER; note = 2'-O-methyluridine-3'-phosphorothioate
  modified_base 2: mod_base = OTHER; note = 2'-O-methylguanosine-3'-phosphorothioate
  modified_base 3: mod_base = OTHER; note = 2'-O-methyladenosine-3'-phosphorothioate
  modified_base 4: mod_base = OTHER; note = 2'-O-methyladenosine-3'-phosphorothioate
  modified_base 5: mod_base = OTHER; note = 2'-O-methyladenosine-3'-phosphorothioate
  modified_base 6: mod_base = OTHER; note = 2'-deoxyguanosine-3'-phosphorothioate
  modified_base 7: mod_base = OTHER; note = 2'-deoxythymidine-3'-phosphorothioate
  modified_base 8: mod_base = OTHER; note = 5'-methyl-deoxycytidine-3'-phosphorothioate
  modified_base 9: mod_base = OTHER; note = 5'-methyl-deoxycytidine-3'-phosphorothioate
  modified_base 10: mod_base = OTHER; note = 2'-deoxyadenosine-3'-phosphorothioate
  modified_base 11: mod_base = OTHER; note = 2'-deoxythymidine-3'-phosphorothioate
  modified_base 12: mod_base = OTHER; note = 2'-deoxythymidine-3'-phosphorothioate
  modified_base 13: mod_base = OTHER; note = 2'-deoxythymidine-3'-phosphorothioate
  modified_base 14: mod_base = OTHER; note = 5'-methyl-deoxycytidine-3'-phosphorothioate
  modified_base 15: mod_base = OTHER; note = 2'-deoxythymidine-3'-phosphorothioate
  modified_base 16: mod_base = OTHER; note = 2'-O-methyluridine-3'-phosphorothioate
  modified_base 17: mod_base = OTHER; note = 2'-O-methyluridine-3'-phosphorothioate
  modified_base 18: mod_base = OTHER; note = 2'-O-methylcytidine-3'-phosphorothioate
  modified_base 19: mod_base = OTHER; note = 2'-O-methyluridine-3'-phosphorothioate
  modified_base 20: mod_base = OTHER; note = 2'-O-methyladenosine-3'-phosphate
  misc_feature 1..5: note = RNA
  misc_feature 6..15: note = DNA
  misc_feature 16..20: note = RNA
tgaaagtccatttctttcta

SEQ ID NO: 4276 - DNA, 20 bp, synthetic construct
  source 1..20: mol_type = other DNA; note = Description of Artificial Sequence: Synthetic oligonucleotide; note = Description of Combined DNA/RNA Molecule: Synthetic oligonucleotide
  modified_base 1: mod_base = OTHER; note = 2'-O-methyluridine-3'-phosphorothioate
  modified_base 2: mod_base = OTHER; note = 2'-O-methyladenosine-3'-phosphorothioate
  modified_base 3: mod_base = OTHER; note = 2'-O-methyluridine-3'-phosphorothioate
  modified_base 4: mod_base = OTHER; note = 2'-O-methyladenosine-3'-phosphorothioate
  modified_base 5: mod_base = OTHER; note = 2'-O-methyluridine-3'-phosphorothioate
  modified_base 6: mod_base = OTHER; note = 2'-deoxythymidine-3'-phosphorothioate
  modified_base 7: mod_base = OTHER; note = 2'-deoxythymidine-3'-phosphorothioate
  modified_base 8: mod_base = OTHER; note = 5'-methyl-deoxycytidine-3'-phosphorothioate
  modified_base 9: mod_base = OTHER; note = 5'-methyl-deoxycytidine-3'-phosphorothioate
  modified_base 10: mod_base = OTHER; note = 2'-deoxyadenosine-3'-phosphorothioate
  modified_base 11: mod_base = OTHER; note = 2'-deoxyguanosine-3'-phosphorothioate
  modified_base 12: mod_base = OTHER; note = 2'-deoxyguanosine-3'-phosphorothioate
  modified_base 13: mod_base = OTHER; note = 2'-deoxyadenosine-3'-phosphorothioate
  modified_base 14: mod_base = OTHER; note = 2'-deoxythymidine-3'-phosphorothioate
  modified_base 15: mod_base = OTHER; note = 2'-deoxyguanosine-3'-phosphorothioate
  modified_base 16: mod_base = OTHER; note = 2'-O-methyladenosine-3'-phosphorothioate
  modified_base 17: mod_base = OTHER; note = 2'-O-methyladenosine-3'-phosphorothioate
  modified_base 18: mod_base = OTHER; note = 2'-O-methyladenosine-3'-phosphorothioate
  modified_base 19: mod_base = OTHER; note = 2'-O-methylguanosine-3'-phosphorothioate
  modified_base 20: mod_base = OTHER; note = 2'-O-methyluridine-3'-phosphate
  misc_feature 1..5: note = RNA
  misc_feature 6..15: note = DNA
  misc_feature 16..20: note = RNA
tatatttccaggatgaaagt

SEQ ID NO: 4277 - DNA, 20 bp, synthetic construct
  source 1..20: mol_type = other DNA; note = Description of Artificial Sequence: Synthetic oligonucleotide; note = Description of Combined DNA/RNA Molecule: Synthetic oligonucleotide
  modified_base 1: mod_base = OTHER; note = 2'-O-methyluridine-3'-phosphorothioate
  modified_base 2: mod_base = OTHER; note = 2'-O-methyladenosine-3'-phosphorothioate
  modified_base 3: mod_base = OTHER; note = 2'-O-methyladenosine-3'-phosphorothioate
  modified_base 4: mod_base = OTHER; note = 2'-O-methylcytidine-3'-phosphorothioate
  modified_base 5: mod_base = OTHER; note = 2'-O-methyladenosine-3'-phosphorothioate
  modified_base 6: mod_base = OTHER; note = 2'-deoxyguanosine-3'-phosphorothioate
  modified_base 7: mod_base = OTHER; note = 2'-deoxythymidine-3'-phosphorothioate
  modified_base 8: mod_base = OTHER; note = 2'-deoxythymidine-3'-phosphorothioate
  modified_base 9: mod_base = OTHER; note = 2'-deoxyadenosine-3'-phosphorothioate
  modified_base 10: mod_base = OTHER; note = 2'-deoxyadenosine-3'-phosphorothioate
  modified_base 11: mod_base = OTHER; note = 2'-deoxythymidine-3'-phosphorothioate
  modified_base 12: mod_base = OTHER; note = 2'-deoxyadenosine-3'-phosphorothioate
  modified_base 13: mod_base = OTHER; note = 2'-deoxythymidine-3'-phosphorothioate
  modified_base 14: mod_base = OTHER; note = 2'-deoxyadenosine-3'-phosphorothioate
  modified_base 15: mod_base = OTHER; note = 2'-deoxythymidine-3'-phosphorothioate
  modified_base 16: mod_base = OTHER; note = 2'-O-methyluridine-3'-phosphorothioate
  modified_base 17: mod_base = OTHER; note = 2'-O-methyluridine-3'-phosphorothioate
  modified_base 18: mod_base = OTHER; note = 2'-O-methylcytidine-3'-phosphorothioate
  modified_base 19: mod_base = OTHER; note = 2'-O-methylcytidine-3'-phosphorothioate
  modified_base 20: mod_base = OTHER; note = 2'-O-methyladenosine-3'-phosphate
  misc_feature 1..5: note = RNA
  misc_feature 6..15: note = DNA
  misc_feature 16..20: note = RNA
taacagttaatatatttcca

SEQ ID NO: 4278 - DNA, 20 bp, synthetic construct
  source 1..20: mol_type = other DNA; note = Description of Artificial Sequence: Synthetic oligonucleotide; note = Description of Combined DNA/RNA Molecule: Synthetic oligonucleotide
  modified_base 1: mod_base = OTHER; note = 2'-O-methylguanosine-3'-phosphorothioate
  modified_base 2: mod_base = OTHER; note = 2'-O-methyluridine-3'-phosphorothioate
  modified_base 3: mod_base = OTHER; note = 2'-O-methyluridine-3'-phosphorothioate
  modified_base 4: mod_base = OTHER; note = 2'-O-methyluridine-3'-phosphorothioate
  modified_base 5: mod_base = OTHER; note = 2'-O-methyluridine-3'-phosphorothioate
  modified_base 6: mod_base = OTHER; note = 5'-methyl-deoxycytidine-3'-phosphorothioate
  modified_base 7: mod_base = OTHER; note = 2'-deoxythymidine-3'-phosphorothioate
  modified_base 8: mod_base = OTHER; note = 2'-deoxythymidine-3'-phosphorothioate
  modified_base 9: mod_base = OTHER; note = 2'-deoxythymidine-3'-phosphorothioate
  modified_base 10: mod_base = OTHER; note = 2'-deoxythymidine-3'-phosphorothioate
  modified_base 11: mod_base = OTHER; note = 2'-deoxythymidine-3'-phosphorothioate
  modified_base 12: mod_base = OTHER; note = 2'-deoxyadenosine-3'-phosphorothioate
  modified_base 13: mod_base = OTHER; note = 2'-deoxyadenosine-3'-phosphorothioate
  modified_base 14: mod_base = OTHER; note = 5'-methyl-deoxycytidine-3'-phosphorothioate
  modified_base 15: mod_base = OTHER; note = 2'-deoxyadenosine-3'-phosphorothioate
  modified_base 16: mod_base = OTHER; note = 2'-O-methylguanosine-3'-phosphorothioate
  modified_base 17: mod_base = OTHER; note = 2'-O-methyluridine-3'-phosphorothioate
  modified_base 18: mod_base = OTHER; note = 2'-O-methyluridine-3'-phosphorothioate
  modified_base 19: mod_base = OTHER; note = 2'-O-methyladenosine-3'-phosphorothioate
  modified_base 20: mod_base = OTHER; note = 2'-O-methyladenosine-3'-phosphate
  misc_feature 1..5: note = RNA
  misc_feature 6..15: note = DNA
  misc_feature 16..20: note = RNA
gttttctttttaacagttaa

SEQ ID NO: 4279 - DNA, 20 bp, synthetic construct
  source 1..20: mol_type = other DNA; note = Description of Artificial Sequence: Synthetic oligonucleotide; note = Description of Combined DNA/RNA Molecule: Synthetic oligonucleotide
  modified_base 1: mod_base = OTHER; note = 2'-O-methylcytidine-3'-phosphorothioate
  modified_base 2: mod_base = OTHER; note = 2'-O-methyladenosine-3'-phosphorothioate
  modified_base 3: mod_base = OTHER; note = 2'-O-methylcytidine-3'-phosphorothioate
  modified_base 4: mod_base = OTHER; note = 2'-O-methyladenosine-3'-phosphorothioate
  modified_base 5: mod_base = OTHER; note = 2'-O-methyluridine-3'-phosphorothioate
  modified_base 6: mod_base = OTHER; note = 2'-deoxythymidine-3'-phosphorothioate
  modified_base 7: mod_base = OTHER; note = 2'-deoxythymidine-3'-phosphorothioate
  modified_base 8: mod_base = OTHER; note = 2'-deoxythymidine-3'-phosphorothioate
  modified_base 9: mod_base = OTHER; note = 5'-methyl-deoxycytidine-3'-phosphorothioate
  modified_base 10: mod_base = OTHER; note = 2'-deoxyadenosine-3'-phosphorothioate
  modified_base 11: mod_base = OTHER; note = 2'-deoxyadenosine-3'-phosphorothioate
  modified_base 12: mod_base = OTHER; note = 2'-deoxythymidine-3'-phosphorothioate
  modified_base 13: mod_base = OTHER; note = 2'-deoxyguanosine-3'-phosphorothioate
  modified_base 14: mod_base = OTHER; note = 2'-deoxythymidine-3'-phosphorothioate
  modified_base 15: mod_base = OTHER; note = 2'-deoxythymidine-3'-phosphorothioate
  modified_base 16: mod_base = OTHER; note = 2'-O-methyluridine-3'-phosphorothioate
  modified_base 17: mod_base = OTHER; note = 2'-O-methyluridine-3'-phosphorothioate
  modified_base 18: mod_base = OTHER; note = 2'-O-methylcytidine-3'-phosphorothioate
  modified_base 19: mod_base = OTHER; note = 2'-O-methyluridine-3'-phosphorothioate
  modified_base 20: mod_base = OTHER; note = 2'-O-methyluridine-3'-phosphate
  misc_feature 1..5: note = RNA
  misc_feature 6..15: note = DNA
  misc_feature 16..20: note = RNA
cacattttcaatgttttctt

SEQ ID NO: 4280 - DNA, 20 bp, synthetic construct
  source 1..20: mol_type = other DNA; note = Description of Artificial Sequence: Synthetic oligonucleotide; note = Description of Combined DNA/RNA Molecule: Synthetic oligonucleotide
  modified_base 1: mod_base = OTHER; note = 2'-O-methyladenosine-3'-phosphorothioate
  modified_base 2: mod_base = OTHER; note = 2'-O-methylcytidine-3'-phosphorothioate
  modified_base 3: mod_base = OTHER; note = 2'-O-methylguanosine-3'-phosphorothioate
  modified_base 4: mod_base = OTHER; note = 2'-O-methyluridine-3'-phosphorothioate
  modified_base 5: mod_base = OTHER; note = 2'-O-methyluridine-3'-phosphorothioate
  modified_base 6: mod_base = OTHER; note = 2'-deoxyguanosine-3'-phosphorothioate
  modified_base 7: mod_base = OTHER; note = 2'-deoxythymidine-3'-phosphorothioate
  modified_base 8: mod_base = OTHER; note = 5'-methyl-deoxycytidine-3'-phosphorothioate
  modified_base 9: mod_base = OTHER; note = 2'-deoxythymidine-3'-phosphorothioate
  modified_base 10: mod_base = OTHER; note = 2'-deoxyadenosine-3'-phosphorothioate
  modified_base 11: mod_base = OTHER; note = 2'-deoxyadenosine-3'-phosphorothioate
  modified_base 12: mod_base = OTHER; note = 2'-deoxyadenosine-3'-phosphorothioate
  modified_base 13: mod_base = OTHER; note = 5'-methyl-deoxycytidine-3'-phosphorothioate
  modified_base 14: mod_base = OTHER; note = 2'-deoxyadenosine-3'-phosphorothioate
  modified_base 15: mod_base = OTHER; note = 5'-methyl-deoxycytidine-3'-phosphorothioate
  modified_base 16: mod_base = OTHER; note = 2'-O-methyladenosine-3'-phosphorothioate
  modified_base 17: mod_base = OTHER; note = 2'-O-methyluridine-3'-phosphorothioate
  modified_base 18: mod_base = OTHER; note = 2'-O-methyluridine-3'-phosphorothioate
  modified_base 19: mod_base = OTHER; note = 2'-O-methyluridine-3'-phosphorothioate
  modified_base 20: mod_base = OTHER; note = 2'-O-methyluridine-3'-phosphate
  misc_feature 1..5: note = RNA
  misc_feature 6..15: note = DNA
  misc_feature 16..20: note = RNA
acgttgtctaaacacatttt

SEQ ID NO: 4281 - DNA, 20 bp, synthetic construct
  source 1..20: mol_type = other DNA; note = Description of Artificial Sequence: Synthetic oligonucleotide; note = Description of Combined DNA/RNA Molecule: Synthetic oligonucleotide
  modified_base 1: mod_base = OTHER; note = 2'-O-methylcytidine-3'-phosphorothioate
  modified_base 2: mod_base = OTHER; note = 2'-O-methyladenosine-3'-phosphorothioate
  modified_base 3: mod_base = OTHER; note = 2'-O-methylguanosine-3'-phosphorothioate
  modified_base 4: mod_base = OTHER; note = 2'-O-methylguanosine-3'-phosphorothioate
  modified_base 5: mod_base = OTHER; note = 2'-O-methylguanosine-3'-phosphorothioate
  modified_base 6: mod_base = OTHER; note = 2'-deoxyguanosine-3'-phosphorothioate
  modified_base 7: mod_base = OTHER; note = 2'-deoxyadenosine-3'-phosphorothioate
  modified_base 8: mod_base = OTHER; note = 2'-deoxythymidine-3'-phosphorothioate
  modified_base 9: mod_base = OTHER; note = 2'-deoxyguanosine-3'-phosphorothioate
  modified_base 10: mod_base = OTHER; note = 2'-deoxyadenosine-3'-phosphorothioate
  modified_base 11: mod_base = OTHER; note = 5'-methyl-deoxycytidine-3'-phosphorothioate
  modified_base 12: mod_base = OTHER; note = 2'-deoxyguanosine-3'-phosphorothioate
  modified_base 13: mod_base = OTHER; note = 2'-deoxythymidine-3'-phosphorothioate
  modified_base 14: mod_base = OTHER; note = 2'-deoxythymidine-3'-phosphorothioate
  modified_base 15: mod_base = OTHER; note = 2'-deoxyguanosine-3'-phosphorothioate
  modified_base 16: mod_base = OTHER; note = 2'-O-methyluridine-3'-phosphorothioate
  modified_base 17: mod_base = OTHER; note = 2'-O-methylcytidine-3'-phosphorothioate
  modified_base 18: mod_base = OTHER; note = 2'-O-methyluridine-3'-phosphorothioate
  modified_base 19: mod_base = OTHER; note = 2'-O-methyladenosine-3'-phosphorothioate
  modified_base 20: mod_base = OTHER; note = 2'-O-methyladenosine-3'-phosphate
  misc_feature 1..5: note = RNA
  misc_feature 6..15: note = DNA
  misc_feature 16..20: note = RNA
caggggatgacgttgtctaa

SEQ ID NO: 4282 - DNA, 20 bp, synthetic construct
  source 1..20: mol_type = other DNA; note = Description of Artificial Sequence: Synthetic oligonucleotide; note = Description of Combined DNA/RNA Molecule: Synthetic oligonucleotide
  modified_base 1: mod_base = OTHER; note = 2'-O-methylcytidine-3'-phosphorothioate
  modified_base 2: mod_base = OTHER; note = 2'-O-methyladenosine-3'-phosphorothioate
  modified_base 3: mod_base = OTHER; note = 2'-O-methylcytidine-3'-phosphorothioate
  modified_base 4: mod_base = OTHER; note = 2'-O-methyluridine-3'-phosphorothioate
  modified_base 5: mod_base = OTHER; note = 2'-O-methyluridine-3'-phosphorothioate
  modified_base 6: mod_base = OTHER; note = 2'-deoxythymidine-3'-phosphorothioate
  modified_base 7: mod_base = OTHER; note = 2'-deoxyadenosine-3'-phosphorothioate
  modified_base 8: mod_base = OTHER; note = 2'-deoxyguanosine-3'-phosphorothioate
  modified_base 9: mod_base = OTHER; note = 5'-methyl-deoxycytidine-3'-phosphorothioate
  modified_base 10: mod_base = OTHER; note = 5'-methyl-deoxycytidine-3'-phosphorothioate
  modified_base 11: mod_base = OTHER; note = 2'-deoxythymidine-3'-phosphorothioate
  modified_base 12: mod_base = OTHER; note = 2'-deoxyguanosine-3'-phosphorothioate
  modified_base 13: mod_base = OTHER; note = 5'-methyl-deoxycytidine-3'-phosphorothioate
  modified_base 14: mod_base = OTHER; note = 5'-methyl-deoxycytidine-3'-phosphorothioate
  modified_base 15: mod_base = OTHER; note = 2'-deoxyadenosine-3'-phosphorothioate
  modified_base 16: mod_base = OTHER; note = 2'-O-methylguanosine-3'-phosphorothioate
  modified_base 17: mod_base = OTHER; note = 2'-O-methylguanosine-3'-phosphorothioate
  modified_base 18: mod_base = OTHER; note = 2'-O-methylguanosine-3'-phosphorothioate
  modified_base 19: mod_base = OTHER; note = 2'-O-methylguanosine-3'-phosphorothioate
  modified_base 20: mod_base = OTHER; note = 2'-O-methyladenosine-3'-phosphate
  misc_feature 1..5: note = RNA
  misc_feature 6..15: note = DNA
  misc_feature 16..20: note = RNA
cactttagcctgccagggga

SEQ ID NO: 4283 - DNA, 20 bp, synthetic construct
  source 1..20: mol_type = other DNA; note = Description of Artificial Sequence: Synthetic oligonucleotide; note = Description of Combined DNA/RNA Molecule: Synthetic oligonucleotide
  modified_base 1: mod_base = OTHER; note = 2'-O-methyladenosine-3'-phosphorothioate
  modified_base 2: mod_base = OTHER; note = 2'-O-methyladenosine-3'-phosphorothioate
  modified_base 3: mod_base = OTHER; note = 2'-O-methyladenosine-3'-phosphorothioate
  modified_base 4: mod_base = OTHER; note = 2'-O-methylguanosine-3'-phosphorothioate
  modified_base 5: mod_base = OTHER; note = 2'-O-methylguanosine-3'-phosphorothioate
  modified_base 6: mod_base = OTHER; note = 2'-deoxyadenosine-3'-phosphorothioate
  modified_base 7: mod_base = OTHER; note = 2'-deoxythymidine-3'-phosphorothioate
  modified_base 8: mod_base = OTHER; note = 2'-deoxyadenosine-3'-phosphorothioate
  modified_base 9: mod_base = OTHER; note = 5'-methyl-deoxycytidine-3'-phosphorothioate
  modified_base 10: mod_base = OTHER; note = 2'-deoxyadenosine-3'-phosphorothioate
  modified_base 11: mod_base = OTHER; note = 2'-deoxyguanosine-3'-phosphorothioate
  modified_base 12: mod_base = OTHER; note = 5'-methyl-deoxycytidine-3'-phosphorothioate
  modified_base 13: mod_base = OTHER; note = 2'-deoxyadenosine-3'-phosphorothioate
  modified_base 14: mod_base = OTHER; note = 5'-methyl-deoxycytidine-3'-phosphorothioate
  modified_base 15: mod_base = OTHER; note = 2'-deoxythymidine-3'-phosphorothioate
  modified_base 16: mod_base = OTHER; note = 2'-O-methyluridine-3'-phosphorothioate
  modified_base 17: mod_base = OTHER; note = 2'-O-methyluridine-3'-phosphorothioate
  modified_base 18: mod_base = OTHER; note = 2'-O-methyladenosine-3'-phosphorothioate
  modified_base 19: mod_base = OTHER; note = 2'-O-methylguanosine-3'-phosphorothioate
  modified_base 20: mod_base = OTHER; note = 2'-O-methylcytidine-3'-phosphate
  misc_feature 1..5: note = RNA
  misc_feature 6..15: note = DNA
  misc_feature 16..20: note = RNA
aaaggatacagcactttagc

SEQ ID NO: 4284 - DNA, 20 bp, synthetic construct
  source 1..20: mol_type = other DNA; note = Description of Artificial Sequence: Synthetic oligonucleotide; note = Description of Combined DNA/RNA Molecule: Synthetic oligonucleotide
  modified_base 1: mod_base = OTHER; note = 2'-O-methylcytidine-3'-phosphorothioate
  modified_base 2: mod_base = OTHER; note = 2'-O-methyladenosine-3'-phosphorothioate
  modified_base 3: mod_base = OTHER; note = 2'-O-methyladenosine-3'-phosphorothioate
  modified_base 4: mod_base = OTHER; note = 2'-O-methyluridine-3'-phosphorothioate
  modified_base 5: mod_base = OTHER; note = 2'-O-methyluridine-3'-phosphorothioate
  modified_base 6: mod_base = OTHER; note = 2'-deoxythymidine-3'-phosphorothioate
  modified_base 7: mod_base = OTHER; note = 2'-deoxythymidine-3'-phosphorothioate
  modified_base 8: mod_base = OTHER; note = 2'-deoxyadenosine-3'-phosphorothioate
  modified_base 9: mod_base = OTHER; note = 5'-methyl-deoxycytidine-3'-phosphorothioate
  modified_base 10: mod_base = OTHER; note = 2'-deoxythymidine-3'-phosphorothioate
  modified_base 11: mod_base = OTHER; note = 2'-deoxyadenosine-3'-phosphorothioate
  modified_base 12: mod_base = OTHER; note = 2'-deoxyadenosine-3'-phosphorothioate
  modified_base 13: mod_base = OTHER; note = 2'-deoxyadenosine-3'-phosphorothioate
  modified_base 14: mod_base = OTHER; note = 2'-deoxyguanosine-3'-phosphorothioate
  modified_base 15: mod_base = OTHER; note = 2'-deoxyguanosine-3'-phosphorothioate
  modified_base 16: mod_base = OTHER; note = 2'-O-methyladenosine-3'-phosphorothioate
  modified_base 17: mod_base = OTHER; note = 2'-O-methyluridine-3'-phosphorothioate
  modified_base 18: mod_base = OTHER; note = 2'-O-methyladenosine-3'-phosphorothioate
  modified_base 19: mod_base = OTHER; note = 2'-O-methylcytidine-3'-phosphorothioate
  modified_base 20: mod_base = OTHER; note = 2'-O-methyladenosine-3'-phosphate
  misc_feature 1..5: note = RNA
  misc_feature 6..15: note = DNA
  misc_feature 16..20: note = RNA
caattttactaaaggataca

SEQ ID NO: 4285 - DNA, 20 bp, synthetic construct
  source 1..20: mol_type = other DNA; note = Description of Artificial Sequence: Synthetic oligonucleotide; note = Description of Combined DNA/RNA Molecule: Synthetic oligonucleotide
  modified_base 1: mod_base = OTHER; note = 2'-O-methyluridine-3'-phosphorothioate
  modified_base 2: mod_base = OTHER; note = 2'-O-methyluridine-3'-phosphorothioate
  modified_base 3: mod_base = OTHER; note = 2'-O-methylguanosine-3'-phosphorothioate
  modified_base 4: mod_base = OTHER; note = 2'-O-methylcytidine-3'-phosphorothioate
  modified_base 5: mod_base = OTHER; note = 2'-O-methyluridine-3'-phosphorothioate
  modified_base 6: mod_base = OTHER; note = 2'-deoxyadenosine-3'-phosphorothioate
  modified_base 7: mod_base = OTHER; note = 5'-methyl-deoxycytidine-3'-phosphorothioate
  modified_base 8: mod_base = OTHER; note = 5'-methyl-deoxycytidine-3'-phosphorothioate
  modified_base 9: mod_base = OTHER; note = 2'-deoxythymidine-3'-phosphorothioate
  modified_base 10: mod_base = OTHER; note = 5'-methyl-deoxycytidine-3'-phosphorothioate
  modified_base 11: mod_base = OTHER; note = 5'-methyl-deoxycytidine-3'-phosphorothioate
  modified_base 12: mod_base = OTHER; note = 2'-deoxyadenosine-3'-phosphorothioate
  modified_base 13: mod_base = OTHER; note = 2'-deoxyadenosine-3'-phosphorothioate
  modified_base 14: mod_base = OTHER; note = 2'-deoxythymidine-3'-phosphorothioate
  modified_base 15: mod_base = OTHER; note = 2'-deoxythymidine-3'-phosphorothioate
  modified_base 16: mod_base = OTHER; note = 2'-O-methyluridine-3'-phosphorothioate
  modified_base 17: mod_base = OTHER; note = 2'-O-methyluridine-3'-phosphorothioate
  modified_base 18: mod_base = OTHER; note = 2'-O-methyladenosine-3'-phosphorothioate
  modified_base 19: mod_base = OTHER; note = 2'-O-methylcytidine-3'-phosphorothioate
  modified_base 20: mod_base = OTHER; note = 2'-O-methyluridine-3'-phosphate
  misc_feature 1..5: note = RNA
  misc_feature 6..15: note = DNA
  misc_feature 16..20: note = RNA
ttgctacctccaattttact

SEQ ID NO: 4286 - DNA, 20 bp, synthetic construct
  source 1..20: mol_type = other DNA; note = Description of Artificial Sequence: Synthetic oligonucleotide; note = Description of Combined DNA/RNA Molecule: Synthetic oligonucleotide
  modified_base 1: mod_base = OTHER; note = 2'-O-methylcytidine-3'-phosphorothioate
  modified_base 2: mod_base = OTHER; note = 2'-O-methyladenosine-3'-phosphorothioate
  modified_base 3: mod_base = OTHER; note = 2'-O-methylcytidine-3'-phosphorothioate
  modified_base 4: mod_base = OTHER; note = 2'-O-methylcytidine-3'-phosphorothioate
  modified_base 5: mod_base = OTHER; note = 2'-O-methyluridine-3'-phosphorothioate
  modified_base 6: mod_base = OTHER; note = 2'-deoxythymidine-3'-phosphorothioate
  modified_base 7: mod_base = OTHER; note = 2'-deoxyadenosine-3'-phosphorothioate
  modified_base 8: mod_base = OTHER; note = 2'-deoxyguanosine-3'-phosphorothioate
  modified_base 9: mod_base = OTHER; note = 2'-deoxythymidine-3'-phosphorothioate
  modified_base 10: mod_base = OTHER; note = 2'-deoxyguanosine-3'-phosphorothioate
  modified_base 11: mod_base = OTHER; note = 2'-deoxythymidine-3'-phosphorothioate
  modified_base 12: mod_base = OTHER; note = 2'-deoxythymidine-3'-phosphorothioate
  modified_base 13: mod_base = OTHER; note = 2'-deoxythymidine-3'-phosphorothioate
  modified_base 14: mod_base = OTHER; note = 2'-deoxyguanosine-3'-phosphorothioate
  modified_base 15: mod_base = OTHER; note = 5'-methyl-deoxycytidine-3'-phosphorothioate
  modified_base 16: mod_base = OTHER; note = 2'-O-methyluridine-3'-phosphorothioate
  modified_base 17: mod_base = OTHER; note = 2'-O-methyladenosine-3'-phosphorothioate
  modified_base 18: mod_base = OTHER; note = 2'-O-methylcytidine-3'-phosphorothioate
  modified_base 19: mod_base = OTHER; note = 2'-O-methylcytidine-3'-phosphorothioate
  modified_base 20: mod_base = OTHER; note = 2'-O-methyluridine-3'-phosphate
  misc_feature 1..5: note = RNA
  misc_feature 6..15: note = DNA
  misc_feature 16..20: note = RNA
caccttagtgtttgctacct

SEQ ID NO: 4287 - DNA, 20 bp, synthetic construct
  source 1..20: mol_type = other DNA; note = Description of Artificial Sequence: Synthetic oligonucleotide; note = Description of Combined DNA/RNA Molecule: Synthetic oligonucleotide
  modified_base 1: mod_base = OTHER; note = 2'-O-methyluridine-3'-phosphorothioate
  modified_base 2: mod_base = OTHER; note = 2'-O-methylcytidine-3'-phosphorothioate
  modified_base 3: mod_base = OTHER; note = 2'-O-methyladenosine-3'-phosphorothioate
  modified_base 4: mod_base = OTHER; note = 2'-O-methyluridine-3'-phosphorothioate
  modified_base 5: mod_base = OTHER; note = 2'-O-methyluridine-3'-phosphorothioate
  modified_base 6: mod_base = OTHER; note = 2'-deoxyadenosine-3'-phosphorothioate
  modified_base 7: mod_base = OTHER; note = 2'-deoxythymidine-3'-phosphorothioate
  modified_base 8: mod_base = OTHER; note = 5'-methyl-deoxycytidine-3'-phosphorothioate
  modified_base 9: mod_base = OTHER; note = 2'-deoxythymidine-3'-phosphorothioate
  modified_base 10: mod_base = OTHER; note = 2'-deoxythymidine-3'-phosphorothioate
  modified_base 11: mod_base = OTHER; note = 2'-deoxythymidine-3'-phosphorothioate
  modified_base 12: mod_base = OTHER; note = 2'-deoxythymidine-3'-phosphorothioate
  modified_base 13: mod_base = OTHER; note = 5'-methyl-deoxycytidine-3'-phosphorothioate
  modified_base 14: mod_base = OTHER; note = 2'-deoxyadenosine-3'-phosphorothioate
  modified_base 15: mod_base = OTHER; note = 5'-methyl-deoxycytidine-3'-phosphorothioate
  modified_base 16: mod_base = OTHER; note = 2'-O-methylcytidine-3'-phosphorothioate
  modified_base 17: mod_base = OTHER; note = 2'-O-methyluridine-3'-phosphorothioate
  modified_base 18: mod_base = OTHER; note = 2'-O-methyluridine-3'-phosphorothioate
  modified_base 19: mod_base = OTHER; note = 2'-O-methyladenosine-3'-phosphorothioate
  modified_base 20: mod_base = OTHER; note = 2'-O-methylguanosine-3'-phosphate
  misc_feature 1..5: note = RNA
  misc_feature 6..15: note = DNA
  misc_feature 16..20: note = RNA
tcattatcttttcaccttag

SEQ ID NO: 4288 - DNA, 20 bp, synthetic construct
  source 1..20: mol_type = other DNA; note = Description of Artificial Sequence: Synthetic oligonucleotide; note = Description of Combined DNA/RNA Molecule: Synthetic oligonucleotide
  modified_base 1: mod_base = OTHER; note = 2'-O-methyladenosine-3'-phosphorothioate
  modified_base 2: mod_base = OTHER; note = 2'-O-methyladenosine-3'-phosphorothioate
  modified_base 3: mod_base = OTHER; note = 2'-O-methylcytidine-3'-phosphorothioate
  modified_base 4: mod_base = OTHER; note = 2'-O-methyladenosine-3'-phosphorothioate
  modified_base 5: mod_base = OTHER; note = 2'-O-methyladenosine-3'-phosphorothioate
  modified_base 6: mod_base = OTHER; note = 2'-deoxythymidine-3'-phosphorothioate
  modified_base 7: mod_base = OTHER; note = 2'-deoxyguanosine-3'-phosphorothioate
  modified_base 8: mod_base = OTHER; note = 2'-deoxyadenosine-3'-phosphorothioate
  modified_base 9: mod_base = OTHER; note = 2'-deoxyguanosine-3'-phosphorothioate
  modified_base 10: mod_base = OTHER; note = 2'-deoxyadenosine-3'-phosphorothioate
  modified_base 11: mod_base = OTHER; note = 2'-deoxythymidine-3'-phosphorothioate
  modified_base 12: mod_base = OTHER; note = 5'-methyl-deoxycytidine-3'-phosphorothioate
  modified_base 13: mod_base = OTHER; note = 2'-deoxyadenosine-3'-phosphorothioate
  modified_base 14: mod_base = OTHER; note = 2'-deoxythymidine-3'-phosphorothioate
  modified_base 15: mod_base = OTHER; note = 2'-deoxythymidine-3'-phosphorothioate
  modified_base 16: mod_base = OTHER; note = 2'-O-methyladenosine-3'-phosphorothioate
  modified_base 17: mod_base = OTHER; note = 2'-O-methyluridine-3'-phosphorothioate
  modified_base 18: mod_base = OTHER; note = 2'-O-methylcytidine-3'-phosphorothioate
  modified_base 19: mod_base = OTHER; note = 2'-O-methyluridine-3'-phosphorothioate
  modified_base 20: mod_base = OTHER; note = 2'-O-methyluridine-3'-phosphate
  misc_feature 1..5: note = RNA
  misc_feature 6..15: note = DNA
  misc_feature 16..20: note = RNA
aacaatgagatcattatctt

SEQ ID NO: 4289 - DNA, 20 bp, synthetic construct
  source 1..20: mol_type = other DNA; note = Description of Artificial Sequence: Synthetic oligonucleotide; note = Description of Combined DNA/RNA Molecule: Synthetic oligonucleotide
  modified_base 1: mod_base = OTHER; note = 2'-O-methyluridine-3'-phosphorothioate
  modified_base 2: mod_base = OTHER; note = 2'-O-methyladenosine-3'-phosphorothioate
  modified_base 3: mod_base = OTHER; note = 2'-O-methylcytidine-3'-phosphorothioate
  modified_base 4: mod_base = OTHER; note = 2'-O-methyladenosine-3'-phosphorothioate
  modified_base 5: mod_base = OTHER; note = 2'-O-methylguanosine-3'-phosphorothioate
  modified_base 6: mod_base = OTHER; note = 2'-deoxyguanosine-3'-phosphorothioate
  modified_base 7: mod_base = OTHER; note = 2'-deoxythymidine-3'-phosphorothioate
  modified_base 8: mod_base = OTHER; note = 2'-deoxythymidine-3'-phosphorothioate
  modified_base 9: mod_base = OTHER; note = 2'-deoxyadenosine-3'-phosphorothioate
  modified_base 10: mod_base = OTHER; note = 2'-deoxyadenosine-3'-phosphorothioate
  modified_base 11: mod_base = OTHER; note = 2'-deoxythymidine-3'-phosphorothioate
  modified_base 12: mod_base = OTHER; note = 2'-deoxyadenosine-3'-phosphorothioate
  modified_base 13: mod_base = OTHER; note = 2'-deoxyadenosine-3'-phosphorothioate
  modified_base 14: mod_base = OTHER; note = 2'-deoxyadenosine-3'-phosphorothioate
  modified_base 15: mod_base = OTHER; note = 5'-methyl-deoxycytidine-3'-phosphorothioate
  modified_base 16: mod_base = OTHER; note = 2'-O-methyladenosine-3'-phosphorothioate
  modified_base 17: mod_base = OTHER; note = 2'-O-methyladenosine-3'-phosphorothioate
  modified_base 18: mod_base = OTHER; note = 2'-O-methyluridine-3'-phosphorothioate
  modified_base 19: mod_base = OTHER; note = 2'-O-methylguanosine-3'-phosphorothioate
  modified_base 20: mod_base = OTHER; note = 2'-O-methyladenosine-3'-phosphate
  misc_feature 1..5: note = RNA
  misc_feature 6..15: note = DNA
  misc_feature 16..20: note = RNA
tacaggttaataaacaatga

SEQ ID NO: 4290 - DNA, 20 bp, synthetic construct
  source 1..20: mol_type = other DNA; note = Description of Artificial Sequence: Synthetic oligonucleotide; note = Description of Combined DNA/RNA Molecule: Synthetic oligonucleotide
  modified_base 1: mod_base = OTHER; note = 2'-O-methylguanosine-3'-phosphorothioate
  modified_base 2: mod_base = OTHER; note = 2'-O-methyluridine-3'-phosphorothioate
  modified_base 3: mod_base = OTHER; note = 2'-O-methyladenosine-3'-phosphorothioate
  modified_base 4: mod_base = OTHER; note = 2'-O-methyladenosine-3'-phosphorothioate
  modified_base 5: mod_base = OTHER; note = 2'-O-methyladenosine-3'-phosphorothioate
  modified_base 6: mod_base = OTHER; note = 5'-methyl-deoxycytidine-3'-phosphorothioate
  modified_base 7: mod_base = OTHER; note = 2'-deoxyadenosine-3'-phosphorothioate
  modified_base 8: mod_base = OTHER; note = 2'-deoxyguanosine-3'-phosphorothioate
  modified_base 9: mod_base = OTHER; note = 2'-deoxyadenosine-3'-phosphorothioate
  modified_base 10: mod_base = OTHER; note = 2'-deoxyadenosine-3'-phosphorothioate
  modified_base 11: mod_base = OTHER; note = 2'-deoxythymidine-3'-phosphorothioate
  modified_base 12: mod_base = OTHER; note = 2'-deoxyadenosine-3'-phosphorothioate
  modified_base 13: mod_base = OTHER; note = 5'-methyl-deoxycytidine-3'-phosphorothioate
  modified_base 14: mod_base = OTHER; note = 2'-deoxyadenosine-3'-phosphorothioate
  modified_base 15: mod_base = OTHER; note = 2'-deoxyguanosine-3'-phosphorothioate
  modified_base 16: mod_base = OTHER; note = 2'-O-methylguanosine-3'-phosphorothioate
  modified_base 17: mod_base = OTHER; note = 2'-O-methyluridine-3'-phosphorothioate
  modified_base 18: mod_base = OTHER; note = 2'-O-methyluridine-3'-phosphorothioate
  modified_base 19: mod_base = OTHER; note = 2'-O-methyladenosine-3'-phosphorothioate
  modified_base 20: mod_base = OTHER; note = 2'-O-methyladenosine-3'-phosphate
  misc_feature 1..5: note = RNA
  misc_feature 6..15: note = DNA
  misc_feature 16..20: note = RNA
gtaaacagaatacaggttaa

SEQ ID NO: 4291 - DNA, 20 bp, synthetic construct
  source 1..20: mol_type = other DNA; note = Description of Artificial Sequence: Synthetic oligonucleotide; note = Description of Combined DNA/RNA Molecule: Synthetic oligonucleotide
  modified_base 1: mod_base = OTHER; note = 2'-O-methyluridine-3'-phosphorothioate
  modified_base 2: mod_base = OTHER; note = 2'-O-methyluridine-3'-phosphorothioate
  modified_base 3: mod_base = OTHER; note = 2'-O-methyluridine-3'-phosphorothioate
  modified_base 4: mod_base = OTHER; note = 2'-O-methyladenosine-3'-phosphorothioate
  modified_base 5: mod_base = OTHER; note = 2'-O-methyladenosine-3'-phosphorothioate
  modified_base 6: mod_base = OTHER; note = 2'-deoxyadenosine-3'-phosphorothioate
  modified_base 7: mod_base = OTHER; note = 2'-deoxyguanosine-3'-phosphorothioate
  modified_base 8: mod_base = OTHER; note = 2'-deoxyadenosine-3'-phosphorothioate
  modified_base 9: mod_base = OTHER; note = 5'-methyl-deoxycytidine-3'-phosphorothioate
  modified_base 10: mod_base = OTHER; note = 2'-deoxyadenosine-3'-phosphorothioate
  modified_base 11: mod_base = OTHER; note = 2'-deoxythymidine-3'-phosphorothioate
  modified_base 12: mod_base = OTHER; note = 2'-deoxyguanosine-3'-phosphorothioate
  modified_base 13: mod_base = OTHER; note = 2'-deoxythymidine-3'-phosphorothioate
  modified_base 14: mod_base = OTHER; note = 2'-deoxyadenosine-3'-phosphorothioate
  modified_base 15: mod_base = OTHER; note = 2'-deoxyadenosine-3'-phosphorothioate
  modified_base 16: mod_base = OTHER; note = 2'-O-methyladenosine-3'-phosphorothioate
  modified_base 17: mod_base = OTHER; note = 2'-O-methylcytidine-3'-phosphorothioate
  modified_base 18: mod_base = OTHER; note = 2'-O-methyladenosine-3'-phosphorothioate
  modified_base 19: mod_base = OTHER; note = 2'-O-methylguanosine-3'-phosphorothioate
  modified_base 20: mod_base = OTHER; note = 2'-O-methyladenosine-3'-phosphate
  misc_feature 1..5: note = RNA
  misc_feature 6..15: note = DNA
  misc_feature 16..20: note = RNA
tttaaagacatgtaaacaga

SEQ ID NO: 4292 - DNA, 20 bp, synthetic construct
  source 1..20: mol_type = other DNA; note = Description of Artificial Sequence: Synthetic oligonucleotide
  modified_base 1: mod_base = OTHER; note = 2'-O-methyladenosine-3'-phosphorothioate
  modified_base 2: mod_base = OTHER; note = 2'-O-methyladenosine-3'-phosphorothioate
  modified_base 3: mod_base = OTHER; note = 2'-O-methylguanosine-3'-phosphorothioate
  modified_base 4: mod_base = OTHER; note = 2'-O-methyladenosine-3'-phosphorothioate
  modified_base 5: mod_base = OTHER; note = 2'-O-methyladenosine-3'-phosphorothioate
  modified_base 6: mod_base = OTHER; note = 5'-methyl-deoxycytidine-3'-phosphorothioate
  modified_base 7: mod_base = OTHER; note = 5'-methyl-deoxycytidine-3'-phosphorothioate
  modified_base 8: mod_base = OTHER; note = 2'-deoxyadenosine-3'-phosphorothioate
  modified_base 9: mod_base = OTHER; note = 5'-methyl-deoxycytidine-3'-phosphorothioate
  modified_base 10: mod_base = OTHER; note = 2'-deoxythymidine-3'-phosphorothioate
  modified_base 11: mod_base = OTHER; note = 2'-deoxyguanosine-3'-phosphorothioate
  modified_base 12: mod_base = OTHER; note = 2'-deoxythymidine-3'-phosphorothioate
  modified_base 13: mod_base = OTHER; note = 2'-deoxythymidine-3'-phosphorothioate
  modified_base 14: mod_base = OTHER; note = 2'-deoxythymidine-3'-phosphorothioate
  modified_base 15: mod_base = OTHER; note = 2'-deoxythymidine-3'-phosphorothioate
  modified_base 16: mod_base = OTHER; note = 2'-O-methyladenosine-3'-phosphorothioate
  modified_base 17: mod_base = OTHER; note = 2'-O-methyladenosine-3'-phosphorothioate
  modified_base 18: mod_base = OTHER; note = 2'-O-methyladenosine-3'-phosphorothioate
  modified_base 19: mod_base = OTHER; note = 2'-O-methylguanosine-3'-phosphorothioate
  modified_base 20: mod_base = OTHER; note = 2'-O-methyladenosine-3'-phosphate
  misc_feature 1..5: note = RNA
  misc_feature 6..15: note = DNA
  misc_feature 16..20: note = RNA
aagaaccactgttttaaaga

SEQ ID NO: 4293 - DNA, 20 bp, synthetic construct
  source 1..20: mol_type = other DNA; note = Description of Artificial Sequence: Synthetic oligonucleotide; note = Description of Combined DNA/RNA Molecule: Synthetic oligonucleotide
  modified_base 1: mod_base = OTHER; note = 2'-O-methylcytidine-3'-phosphorothioate
  modified_base 2: mod_base = OTHER; note = 2'-O-methyluridine-3'-phosphorothioate
  modified_base 3: mod_base = OTHER; note = 2'-O-methyluridine-3'-phosphorothioate
  modified_base 4: mod_base = OTHER; note = 2'-O-methyladenosine-3'-phosphorothioate
  modified_base 5: mod_base = OTHER; note = 2'-O-methylcytidine-3'-phosphorothioate
  modified_base 6: mod_base = OTHER; note = 2'-deoxyadenosine-3'-phosphorothioate
  modified_base 7: mod_base = OTHER; note = 2'-deoxyadenosine-3'-phosphorothioate
  modified_base 8: mod_base = OTHER; note = 2'-deoxythymidine-3'-phosphorothioate
  modified_base 9: mod_base = OTHER; note = 2'-deoxythymidine-3'-phosphorothioate
  modified_base 10: mod_base = OTHER; note = 2'-deoxythymidine-3'-phosphorothioate
  modified_base 11: mod_base = OTHER; note = 2'-deoxyadenosine-3'-phosphorothioate
  modified_base 12: mod_base = OTHER; note = 2'-deoxyadenosine-3'-phosphorothioate
  modified_base 13: mod_base = OTHER; note = 2'-deoxyguanosine-3'-phosphorothioate
  modified_base 14: mod_base = OTHER; note = 2'-deoxyadenosine-3'-phosphorothioate
  modified_base 15: mod_base = OTHER; note = 2'-deoxyadenosine-3'-phosphorothioate
  modified_base 16: mod_base = OTHER; note = 2'-O-methylcytidine-3'-phosphorothioate
  modified_base 17: mod_base = OTHER; note = 2'-O-methylcytidine-3'-phosphorothioate
  modified_base 18: mod_base = OTHER; note = 2'-O-methyladenosine-3'-phosphorothioate
  modified_base 19: mod_base = OTHER; note = 2'-O-methylcytidine-3'-phosphorothioate
  modified_base 20: mod_base = OTHER; note = 2'-O-methyluridine-3'-phosphate
  misc_feature 1..5: note = RNA
  misc_feature 6..15: note = DNA
  misc_feature 16..20: note = RNA
cttacaatttaagaaccact

SEQ ID NO: 4294 - DNA, 20 bp, synthetic construct
  source 1..20: mol_type = other DNA; note = Description of Artificial Sequence: Synthetic oligonucleotide; note = Description of Combined DNA/RNA Molecule: Synthetic oligonucleotide
  modified_base 1: mod_base = OTHER; note = 2'-O-methylcytidine-3'-phosphorothioate
  modified_base 2: mod_base = OTHER; note = 2'-O-methyluridine-3'-phosphorothioate
  modified_base 3: mod_base = OTHER; note = 2'-O-methyluridine-3'-phosphorothioate
  modified_base 4: mod_base = OTHER; note = 2'-O-methyluridine-3'-phosphorothioate
  modified_base 5: mod_base = OTHER; note = 2'-O-methylguanosine-3'-phosphorothioate
  modified_base 6: mod_base = OTHER; note = 2'-deoxyadenosine-3'-phosphorothioate
  modified_base 7: mod_base = OTHER; note = 2'-deoxyadenosine-3'-phosphorothioate
  modified_base 8: mod_base = OTHER; note = 5'-methyl-deoxycytidine-3'-phosphorothioate
  modified_base 9: mod_base = OTHER; note = 5'-methyl-deoxycytidine-3'-phosphorothioate
  modified_base 10: mod_base = OTHER; note = 2'-deoxythymidine-3'-phosphorothioate
  modified_base 11: mod_base = OTHER; note = 2'-deoxyguanosine-3'-phosphorothioate
  modified_base 12: mod_base = OTHER; note = 2'-deoxyadenosine-3'-phosphorothioate
  modified_base 13: mod_base = OTHER; note = 2'-deoxyguanosine-3'-phosphorothioate
  modified_base 14: mod_base = OTHER; note = 5'-methyl-deoxycytidine-3'-phosphorothioate
  modified_base 15: mod_base = OTHER; note = 2'-deoxythymidine-3'-phosphorothioate
  modified_base 16: mod_base = OTHER; note = 2'-O-methyluridine-3'-phosphorothioate
  modified_base 17: mod_base = OTHER; note = 2'-O-methyladenosine-3'-phosphorothioate
  modified_base 18: mod_base = OTHER; note = 2'-O-methylcytidine-3'-phosphorothioate
  modified_base 19: mod_base = OTHER; note = 2'-O-methyladenosine-3'-phosphorothioate
  modified_base 20: mod_base = OTHER; note = 2'-O-methyladenosine-3'-phosphate
  misc_feature 1..5: note = RNA
  misc_feature 6..15: note = DNA
  misc_feature 16..20: note = RNA
ctttgaacctgagcttacaa

SEQ ID NO: 4295 - DNA, 20 bp, synthetic construct
  source 1..20: mol_type = other DNA; note = Description of Artificial Sequence: Synthetic oligonucleotide; note = Description of Combined DNA/RNA Molecule: Synthetic oligonucleotide
  modified_base 1: mod_base = OTHER; note = 2'-O-methyladenosine-3'-phosphorothioate
  modified_base 2: mod_base = OTHER; note = 2'-O-methyluridine-3'-phosphorothioate
  modified_base 3: mod_base = OTHER; note = 2'-O-methyluridine-3'-phosphorothioate
  modified_base 4: mod_base = OTHER; note = 2'-O-methyladenosine-3'-phosphorothioate
  modified_base 5: mod_base = OTHER; note = 2'-O-methylcytidine-3'-phosphorothioate
  modified_base 6: mod_base = OTHER; note = 5'-methyl-deoxycytidine-3'-phosphorothioate
  modified_base 7: mod_base = OTHER; note = 2'-deoxyadenosine-3'-phosphorothioate
  modified_base 8: mod_base = OTHER; note = 2'-deoxyadenosine-3'-phosphorothioate
  modified_base 9: mod_base = OTHER; note = 5'-methyl-deoxycytidine-3'-phosphorothioate
  modified_base 10: mod_base = OTHER; note = 2'-deoxyadenosine-3'-phosphorothioate
  modified_base 11: mod_base = OTHER; note = 5'-methyl-deoxycytidine-3'-phosphorothioate
  modified_base 12: mod_base = OTHER; note = 2'-deoxythymidine-3'-phosphorothioate
  modified_base 13: mod_base = OTHER; note = 2'-deoxythymidine-3'-phosphorothioate
  modified_base 14: mod_base = OTHER; note = 2'-deoxythymidine-3'-phosphorothioate
  modified_base 15: mod_base = OTHER; note = 2'-deoxyguanosine-3'-phosphorothioate
  modified_base 16: mod_base = OTHER; note = 2'-O-methyladenosine-3'-phosphorothioate
  modified_base 17: mod_base = OTHER; note = 2'-O-methyladenosine-3'-phosphorothioate
  modified_base 18: mod_base = OTHER; note = 2'-O-methylcytidine-3'-phosphorothioate
  modified_base 19: mod_base = OTHER; note = 2'-O-methylcytidine-3'-phosphorothioate
  modified_base 20: mod_base = OTHER; note = 2'-O-methyluridine-3'-phosphate
  misc_feature 1..5: note = RNA
  misc_feature 6..15: note = DNA
  misc_feature 16..20: note = RNA
attaccaacactttgaacct

SEQ ID NO: 4296 - DNA, 20 bp, synthetic construct
  source 1..20: mol_type = other DNA; note = Description of Artificial Sequence: Synthetic oligonucleotide; note = Description of Combined DNA/RNA Molecule: Synthetic oligonucleotide
  modified_base 1: mod_base = OTHER; note = 2'-O-methyluridine-3'-phosphorothioate
  modified_base 2: mod_base = OTHER; note = 2'-O-methylguanosine-3'-phosphorothioate
  modified_base 3: mod_base = OTHER; note = 2'-O-methyluridine-3'-phosphorothioate
  modified_base 4: mod_base = OTHER; note = 2'-O-methylguanosine-3'-phosphorothioate
  modified_base 5: mod_base = OTHER; note = 2'-O-methyladenosine-3'-phosphorothioate
  modified_base 6: mod_base = OTHER; note = 2'-deoxyadenosine-3'-phosphorothioate
  modified_base 7: mod_base = OTHER; note = 2'-deoxythymidine-3'-phosphorothioate
  modified_base 8: mod_base = OTHER; note = 5'-methyl-deoxycytidine-3'-phosphorothioate
  modified_base 9: mod_base = OTHER; note = 2'-deoxyadenosine-3'-phosphorothioate
  modified_base 10: mod_base = OTHER; note = 2'-deoxyguanosine-3'-phosphorothioate
  modified_base 11: mod_base = OTHER; note = 2'-deoxyguanosine-3'-phosphorothioate
  modified_base 12: mod_base = OTHER; note = 5'-methyl-deoxycytidine-3'-phosphorothioate
  modified_base 13: mod_base = OTHER; note = 2'-deoxyadenosine-3'-phosphorothioate
  modified_base 14: mod_base = OTHER; note = 2'-deoxythymidine-3'-phosphorothioate
  modified_base 15: mod_base = OTHER; note = 2'-deoxythymidine-3'-phosphorothioate
  modified_base 16: mod_base = OTHER; note = 2'-O-methyladenosine-3'-phosphorothioate
  modified_base 17: mod_base = OTHER; note = 2'-O-methylcytidine-3'-phosphorothioate
  modified_base 18: mod_base = OTHER; note = 2'-O-methylcytidine-3'-phosphorothioate
  modified_base 19: mod_base = OTHER; note = 2'-O-methyladenosine-3'-phosphorothioate
  modified_base 20: mod_base = OTHER; note = 2'-O-methyladenosine-3'-phosphate
  misc_feature 1..5: note = RNA
  misc_feature 6..15: note = DNA
  misc_feature 16..20: note = RNA
tgtgaatcaggcattaccaa

SEQ ID NO: 4297 - DNA, 20 bp, synthetic construct
  source 1..20: mol_type = other DNA; note = Description of Artificial Sequence: Synthetic oligonucleotide; note = Description of Combined DNA/RNA Molecule: Synthetic oligonucleotide
  modified_base 1: mod_base = OTHER; note = 2'-O-methyluridine-3'-phosphorothioate
  modified_base 2: mod_base = OTHER; note = 2'-O-methylcytidine-3'-phosphorothioate
  modified_base 3: mod_base = OTHER; note = 2'-O-methyluridine-3'-phosphorothioate
  modified_base 4: mod_base = OTHER; note = 2'-O-methylcytidine-3'-phosphorothioate
  modified_base 5: mod_base = OTHER; note = 2'-O-methyladenosine-3'-phosphorothioate
  modified_base 6: mod_base = OTHER; note = 2'-deoxyadenosine-3'-phosphorothioate
  modified_base 7: mod_base = OTHER; note = 2'-deoxyadenosine-3'-phosphorothioate
  modified_base 8: mod_base = OTHER; note = 2'-deoxyguanosine-3'-phosphorothioate
  modified_base 9: mod_base = OTHER; note = 2'-deoxythymidine-3'-phosphorothioate
  modified_base 10: mod_base = OTHER; note = 2'-deoxythymidine-3'-phosphorothioate
  modified_base 11: mod_base = OTHER; note = 2'-deoxyguanosine-3'-phosphorothioate
  modified_base 12: mod_base = OTHER; note = 2'-deoxythymidine-3'-phosphorothioate
  modified_base 13: mod_base = OTHER; note = 2'-deoxyguanosine-3'-phosphorothioate
  modified_base 14: mod_base = OTHER; note = 2'-deoxyadenosine-3'-phosphorothioate
  modified_base 15: mod_base = OTHER; note = 2'-deoxyadenosine-3'-phosphorothioate
  modified_base 16: mod_base = OTHER; note = 2'-O-methyluridine-3'-phosphorothioate
  modified_base 17: mod_base = OTHER; note = 2'-O-methylcytidine-3'-phosphorothioate
  modified_base 18: mod_base = OTHER; note = 2'-O-methyladenosine-3'-phosphorothioate
  modified_base 19: mod_base = OTHER; note = 2'-O-methylguanosine-3'-phosphorothioate
  modified_base 20: mod_base = OTHER; note = 2'-O-methylguanosine-3'-phosphate
  misc_feature 1..5: note = RNA
  misc_feature 6..15: note = DNA
  misc_feature 16..20: note = RNA
tctcaaagttgtgaatcagg

SEQ ID NO: 4298 - DNA, 20 bp, synthetic construct
  source 1..20: mol_type = other DNA; note = Description of Artificial Sequence: Synthetic oligonucleotide; note = Description of Combined DNA/RNA Molecule: Synthetic oligonucleotide
  modified_base 1: mod_base = OTHER; note = 2'-O-methylcytidine-3'-phosphorothioate
  modified_base 2: mod_base = OTHER; note = 2'-O-methyladenosine-3'-phosphorothioate
  modified_base 3: mod_base = OTHER; note = 2'-O-methylguanosine-3'-phosphorothioate
  modified_base 4: mod_base = OTHER; note = 2'-O-methyluridine-3'-phosphorothioate
  modified_base 5: mod_base = OTHER; note = 2'-O-methylguanosine-3'-phosphorothioate
  modified_base 6: mod_base = OTHER; note = 5'-methyl-deoxycytidine-3'-phosphorothioate
  modified_base 7: mod_base = OTHER; note = 2'-deoxythymidine-3'-phosphorothioate
  modified_base 8: mod_base = OTHER; note = 2'-deoxyadenosine-3'-phosphorothioate
  modified_base 9: mod_base = OTHER; note = 5'-methyl-deoxycytidine-3'-phosphorothioate
  modified_base 10: mod_base = OTHER; note = 5'-methyl-deoxycytidine-3'-phosphorothioate
  modified_base 11: mod_base = OTHER; note = 2'-deoxythymidine-3'-phosphorothioate
  modified_base 12: mod_base = OTHER; note = 2'-deoxythymidine-3'-phosphorothioate
  modified_base 13: mod_base = OTHER; note = 5'-methyl-deoxycytidine-3'-phosphorothioate
  modified_base 14: mod_base = OTHER; note = 2'-deoxythymidine-3'-phosphorothioate
  modified_base 15: mod_base = OTHER; note = 5'-methyl-deoxycytidine-3'-phosphorothioate
  modified_base 16: mod_base = OTHER; note = 2'-O-methyladenosine-3'-phosphorothioate
  modified_base 17: mod_base = OTHER; note = 2'-O-methyladenosine-3'-phosphorothioate
  modified_base 18: mod_base = OTHER; note = 2'-O-methyladenosine-3'-phosphorothioate
  modified_base 19: mod_base = OTHER; note = 2'-O-methylguanosine-3'-phosphorothioate
  modified_base 20: mod_base = OTHER; note = 2'-O-methyluridine-3'-phosphate
  misc_feature 1..5: note = RNA
  misc_feature 6..15: note = DNA
  misc_feature 16..20: note = RNA
cagtgctaccttctcaaagt

SEQ ID NO: 4299 - DNA, 20 bp, synthetic construct
  source 1..20: mol_type = other DNA; note = Description of Artificial Sequence: Synthetic oligonucleotide; note = Description of Combined DNA/RNA Molecule: Synthetic oligonucleotide
  modified_base 1: mod_base = OTHER; note = 2'-O-methyluridine-3'-phosphorothioate
  modified_base 2: mod_base = OTHER; note = 2'-O-methyluridine-3'-phosphorothioate
  modified_base 3: mod_base = OTHER; note = 2'-O-methylcytidine-3'-phosphorothioate
  modified_base 4: mod_base = OTHER; note = 2'-O-methylcytidine-3'-phosphorothioate
  modified_base 5: mod_base = OTHER; note = 2'-O-methyladenosine-3'-phosphorothioate
  modified_base 6: mod_base = OTHER; note = 2'-deoxyadenosine-3'-phosphorothioate
  modified_base 7: mod_base = OTHER; note = 2'-deoxythymidine-3'-phosphorothioate
  modified_base 8: mod_base = OTHER; note = 2'-deoxythymidine-3'-phosphorothioate
  modified_base 9: mod_base = OTHER; note = 5'-methyl-deoxycytidine-3'-phosphorothioate
  modified_base 10: mod_base = OTHER; note = 2'-deoxythymidine-3'-phosphorothioate
  modified_base 11: mod_base = OTHER; note = 5'-methyl-deoxycytidine-3'-phosphorothioate
  modified_base 12: mod_base = OTHER; note = 2'-deoxythymidine-3'-phosphorothioate
  modified_base 13: mod_base = OTHER; note = 5'-methyl-deoxycytidine-3'-phosphorothioate
  modified_base 14: mod_base = OTHER; note = 5'-methyl-deoxycytidine-3'-phosphorothioate
  modified_base 15: mod_base = OTHER; note = 2'-deoxyadenosine-3'-phosphorothioate
  modified_base 16: mod_base = OTHER; note = 2'-O-methylguanosine-3'-phosphorothioate
  modified_base 17: mod_base = OTHER; note = 2'-O-methyluridine-3'-phosphorothioate
  modified_base 18: mod_base = OTHER; note = 2'-O-methylguanosine-3'-phosphorothioate
  modified_base 19: mod_base = OTHER; note = 2'-O-methylcytidine-3'-phosphorothioate
  modified_base 20: mod_base = OTHER; note = 2'-O-methyluridine-3'-phosphate
  misc_feature 1..5: note = RNA
  misc_feature 6..15: note = DNA
  misc_feature 16..20: note = RNA
ttccaattctctccagtgct

SEQ ID NO: 4300 - DNA, 20 bp, synthetic construct
  source 1..20: mol_type = other DNA; note = Description of Artificial Sequence: Synthetic oligonucleotide; note = Description of Combined DNA/RNA Molecule: Synthetic oligonucleotide
  modified_base 1: mod_base = OTHER; note = 2'-O-methylcytidine-3'-phosphorothioate
  modified_base 2: mod_base = OTHER; note = 2'-O-methylcytidine-3'-phosphorothioate
  modified_base 3: mod_base = OTHER; note = 2'-O-methylguanosine-3'-phosphorothioate
  modified_base 4: mod_base = OTHER; note = 2'-O-methylcytidine-3'-phosphorothioate
  modified_base 5: mod_base = OTHER; note = 2'-O-methylcytidine-3'-phosphorothioate
  modified_base 6: mod_base = OTHER; note = 2'-deoxyadenosine-3'-phosphorothioate
  modified_base 7: mod_base = OTHER; note = 5'-methyl-deoxycytidine-3'-phosphorothioate
  modified_base 8: mod_base = OTHER; note = 5'-methyl-deoxycytidine-3'-phosphorothioate
  modified_base 9: mod_base = OTHER; note = 5'-methyl-deoxycytidine-3'-phosphorothioate
  modified_base 10: mod_base = OTHER; note = 2'-deoxyadenosine-3'-phosphorothioate
  modified_base 11: mod_base = OTHER; note = 2'-deoxythymidine-3'-phosphorothioate
  modified_base 12: mod_base = OTHER; note = 2'-deoxythymidine-3'-phosphorothioate
  modified_base 13: mod_base = OTHER; note = 5'-methyl-deoxycytidine-3'-phosphorothioate
  modified_base 14: mod_base = OTHER; note = 5'-methyl-deoxycytidine-3'-phosphorothioate
  modified_base 15: mod_base = OTHER; note = 2'-deoxyadenosine-3'-phosphorothioate
  modified_base 16: mod_base = OTHER; note = 2'-O-methyladenosine-3'-phosphorothioate
  modified_base 17: mod_base = OTHER; note = 2'-O-methyluridine-3'-phosphorothioate
  modified_base 18: mod_base = OTHER; note = 2'-O-methyluridine-3'-phosphorothioate
  modified_base 19: mod_base = OTHER; note = 2'-O-methylcytidine-3'-phosphorothioate
  modified_base 20: mod_base = OTHER; note = 2'-O-methyluridine-3'-phosphate
  misc_feature 1..5: note = RNA
  misc_feature 6..15: note = DNA
  misc_feature 16..20: note = RNA
ccgccacccattccaattct

SEQ ID NO: 4301 - DNA, 20 bp, synthetic construct
  source 1..20: mol_type = other DNA; note = Description of Artificial Sequence: Synthetic oligonucleotide; note = Description of Combined DNA/RNA Molecule: Synthetic oligonucleotide
  modified_base 1: mod_base = OTHER; note = 2'-O-methyluridine-3'-phosphorothioate
  modified_base 2: mod_base = OTHER; note = 2'-O-methylcytidine-3'-phosphorothioate
  modified_base 3: mod_base = OTHER; note = 2'-O-methyladenosine-3'-phosphorothioate
  modified_base 4: mod_base = OTHER; note = 2'-O-methylcytidine-3'-phosphorothioate
  modified_base 5: mod_base = OTHER; note = 2'-O-methylcytidine-3'-phosphorothioate
  modified_base 6: mod_base = OTHER; note = 2'-deoxyadenosine-3'-phosphorothioate
  modified_base 7: mod_base = OTHER; note = 2'-deoxyadenosine-3'-phosphorothioate
  modified_base 8: mod_base = OTHER; note = 2'-deoxythymidine-3'-phosphorothioate
  modified_base 9: mod_base = OTHER; note = 2'-deoxythymidine-3'-phosphorothioate
  modified_base 10: mod_base = OTHER; note = 2'-deoxyadenosine-3'-phosphorothioate
  modified_base 11: mod_base = OTHER; note = 5'-methyl-deoxycytidine-3'-phosphorothioate
  modified_base 12: mod_base = OTHER; note = 5'-methyl-deoxycytidine-3'-phosphorothioate
  modified_base 13: mod_base = OTHER; note = 2'-deoxyguanosine-3'-phosphorothioate
  modified_base 14: mod_base = OTHER; note = 5'-methyl-deoxycytidine-3'-phosphorothioate
  modified_base 15: mod_base = OTHER; note = 5'-methyl-deoxycytidine-3'-phosphorothioate
  modified_base 16: mod_base = OTHER; note = 2'-O-methyladenosine-3'-phosphorothioate
  modified_base 17: mod_base = OTHER; note = 2'-O-methylcytidine-3'-phosphorothioate
  modified_base 18: mod_base = OTHER; note = 2'-O-methylcytidine-3'-phosphorothioate
  modified_base 19: mod_base = OTHER; note = 2'-O-methylcytidine-3'-phosphorothioate
  modified_base 20: mod_base = OTHER; note = 2'-O-methyladenosine-3'-phosphate
  misc_feature 1..5: note = RNA
  misc_feature 6..15: note = DNA
  misc_feature 16..20: note = RNA
tcaccaattaccgccaccca

SEQ ID NO: 4302 - DNA, 20 bp, synthetic construct
  source 1..20: mol_type = other DNA; note = Description of Artificial Sequence: Synthetic oligonucleotide; note = Description of Combined DNA/RNA Molecule: Synthetic oligonucleotide
  modified_base 1: mod_base = OTHER; note = 2'-O-methyladenosine-3'-phosphorothioate
  modified_base 2: mod_base = OTHER; note = 2'-O-methyluridine-3'-phosphorothioate
  modified_base 3: mod_base = OTHER; note = 2'-O-methyluridine-3'-phosphorothioate
  modified_base 4: mod_base = OTHER; note = 2'-O-methylcytidine-3'-phosphorothioate
  modified_base 5: mod_base = OTHER; note = 2'-O-methyladenosine-3'-phosphorothioate
  modified_base 6: mod_base = OTHER; note = 2'-deoxyadenosine-3'-phosphorothioate
  modified_base 7: mod_base = OTHER; note = 2'-deoxyadenosine-3'-phosphorothioate
  modified_base 8: mod_base = OTHER; note = 2'-deoxyguanosine-3'-phosphorothioate
  modified_base 9: mod_base = OTHER; note = 2'-deoxyadenosine-3'-phosphorothioate
  modified_base 10: mod_base = OTHER; note = 2'-deoxyadenosine-3'-phosphorothioate
  modified_base 11: mod_base = OTHER; note = 2'-deoxyguanosine-3'-phosphorothioate
  modified_base 12: mod_base = OTHER; note = 2'-deoxythymidine-3'-phosphorothioate
  modified_base 13: mod_base = OTHER; note = 2'-deoxyadenosine-3'-phosphorothioate
  modified_base 14: mod_base = OTHER; note = 2'-deoxythymidine-3'-phosphorothioate
  modified_base 15: mod_base = OTHER; note = 5'-methyl-deoxycytidine-3'-phosphorothioate
  modified_base 16: mod_base = OTHER; note = 2'-O-methyladenosine-3'-phosphorothioate
  modified_base 17: mod_base = OTHER; note = 2'-O-methylcytidine-3'-phosphorothioate
  modified_base 18: mod_base = OTHER; note = 2'-O-methylcytidine-3'-phosphorothioate
  modified_base 19: mod_base = OTHER; note = 2'-O-methyladenosine-3'-phosphorothioate
  modified_base 20: mod_base = OTHER; note = 2'-O-methyladenosine-3'-phosphate
  misc_feature 1..5: note = RNA
  misc_feature 6..15: note = DNA
  misc_feature 16..20: note = RNA
attcaaagaagtatcaccaa

SEQ ID NO: 4303 - DNA, 20 bp, synthetic construct
  source 1..20: mol_type = other DNA; note = Description of Artificial Sequence: Synthetic oligonucleotide; note = Description of Combined DNA/RNA Molecule: Synthetic oligonucleotide
  modified_base 1: mod_base = OTHER; note = 2'-O-methyluridine-3'-phosphorothioate
  modified_base 2: mod_base = OTHER; note = 2'-O-methylguanosine-3'-phosphorothioate
  modified_base 3: mod_base = OTHER; note = 2'-O-methylguanosine-3'-phosphorothioate
  modified_base 4: mod_base = OTHER; note = 2'-O-methyladenosine-3'-phosphorothioate
  modified_base 5: mod_base = OTHER; note = 2'-O-methyladenosine-3'-phosphorothioate
  modified_base 6: mod_base = OTHER; note = 2'-deoxyadenosine-3'-phosphorothioate
  modified_base 7: mod_base = OTHER; note = 2'-deoxythymidine-3'-phosphorothioate
  modified_base 8: mod_base = OTHER; note = 5'-methyl-deoxycytidine-3'-phosphorothioate
  modified_base 9: mod_base = OTHER; note = 2'-deoxythymidine-3'-phosphorothioate
  modified_base 10: mod_base = OTHER; note = 2'-deoxyadenosine-3'-phosphorothioate
  modified_base 11: mod_base = OTHER; note = 5'-methyl-deoxycytidine-3'-phosphorothioate
  modified_base 12: mod_base = OTHER; note = 2'-deoxyadenosine-3'-phosphorothioate
  modified_base 13: mod_base = OTHER; note = 2'-deoxythymidine-3'-phosphorothioate
  modified_base 14: mod_base = OTHER; note = 2'-deoxythymidine-3'-phosphorothioate
  modified_base 15: mod_base = OTHER; note = 5'-methyl-deoxycytidine-3'-phosphorothioate
  modified_base 16: mod_base = OTHER; note = 2'-O-methyladenosine-3'-phosphorothioate
  modified_base 17: mod_base = OTHER; note = 2'-O-methyladenosine-3'-phosphorothioate
  modified_base 18: mod_base = OTHER; note = 2'-O-methyladenosine-3'-phosphorothioate
  modified_base 19: mod_base = OTHER; note = 2'-O-methylguanosine-3'-phosphorothioate
  modified_base 20: mod_base = OTHER; note = 2'-O-methyladenosine-3'-phosphate
  misc_feature 1..5: note = RNA
  misc_feature 6..15: note = DNA
  misc_feature 16..20: note = RNA
tggaaatctacattcaaaga

SEQ ID NO: 4304 - DNA, 20 bp, synthetic construct
  source 1..20: mol_type = other DNA; note = Description of Artificial Sequence: Synthetic oligonucleotide; note = Description of Combined DNA/RNA Molecule: Synthetic oligonucleotide
  modified_base 1: mod_base = OTHER; note = 2'-O-methyladenosine-3'-phosphorothioate
  modified_base 2: mod_base = OTHER; note = 2'-O-methyladenosine-3'-phosphorothioate
  modified_base 3: mod_base = OTHER; note = 2'-O-methylguanosine-3'-phosphorothioate
  modified_base 4: mod_base = OTHER; note = 2'-O-methyladenosine-3'-phosphorothioate
  modified_base 5: mod_base = OTHER; note = 2'-O-methyluridine-3'-phosphorothioate
  modified_base 6: mod_base = OTHER; note = 2'-deoxyguanosine-3'-phosphorothioate
  modified_base 7: mod_base = OTHER; note = 2'-deoxythymidine-3'-phosphorothioate
  modified_base 8: mod_base = OTHER; note = 2'-deoxyguanosine-3'-phosphorothioate
  modified_base 9: mod_base = OTHER; note = 2'-deoxyadenosine-3'-phosphorothioate
  modified_base 10: mod_base = OTHER; note = 2'-deoxythymidine-3'-phosphorothioate
  modified_base 11: mod_base = OTHER; note = 2'-deoxythymidine-3'-phosphorothioate
  modified_base 12: mod_base = OTHER; note = 2'-deoxyguanosine-3'-phosphorothioate
  modified_base 13: mod_base = OTHER; note = 2'-deoxyguanosine-3'-phosphorothioate
  modified_base 14: mod_base = OTHER; note = 2'-deoxyadenosine-3'-phosphorothioate
  modified_base 15: mod_base = OTHER; note = 2'-deoxyadenosine-3'-phosphorothioate
  modified_base 16: mod_base = OTHER; note = 2'-O-methyladenosine-3'-phosphorothioate
  modified_base 17: mod_base = OTHER; note = 2'-O-methyluridine-3'-phosphorothioate
  modified_base 18: mod_base = OTHER; note = 2'-O-methylcytidine-3'-phosphorothioate
  modified_base 19: mod_base = OTHER; note = 2'-O-methyluridine-3'-phosphorothioate
  modified_base 20: mod_base = OTHER; note = 2'-O-methyladenosine-3'-phosphate
  misc_feature 1..5: note = RNA
  misc_feature 6..15: note = DNA
  misc_feature 16..20: note = RNA
aagatgtgattggaaatcta

SEQ ID NO: 4305 - DNA, 20 bp, synthetic construct
  source 1..20: mol_type = other DNA; note = Description of Artificial Sequence: Synthetic oligonucleotide; note = Description of Combined DNA/RNA Molecule: Synthetic oligonucleotide
  modified_base 1: mod_base = OTHER; note = 2'-O-methyluridine-3'-phosphorothioate
  modified_base 2: mod_base = OTHER; note = 2'-O-methyluridine-3'-phosphorothioate
  modified_base 3: mod_base = OTHER; note = 2'-O-methylcytidine-3'-phosphorothioate
  modified_base 4: mod_base = OTHER; note = 2'-O-methyladenosine-3'-phosphorothioate
  modified_base 5: mod_base = OTHER; note = 2'-O-methylguanosine-3'-phosphorothioate
  modified_base 6: mod_base = OTHER; note = 2'-deoxyadenosine-3'-phosphorothioate
  modified_base 7: mod_base = OTHER; note = 5'-methyl-deoxycytidine-3'-phosphorothioate
  modified_base 8: mod_base = OTHER; note = 2'-deoxyadenosine-3'-phosphorothioate
  modified_base 9: mod_base = OTHER; note = 5'-methyl-deoxycytidine-3'-phosphorothioate
  modified_base 10: mod_base = OTHER; note = 2'-deoxythymidine-3'-phosphorothioate
  modified_base 11: mod_base = OTHER; note = 2'-deoxyadenosine-3'-phosphorothioate
  modified_base 12: mod_base = OTHER; note = 2'-deoxyadenosine-3'-phosphorothioate
  modified_base 13: mod_base = OTHER; note = 2'-deoxyadenosine-3'-phosphorothioate
  modified_base 14: mod_base = OTHER; note = 2'-deoxyguanosine-3'-phosphorothioate
  modified_base 15: mod_base = OTHER; note = 2'-deoxyadenosine-3'-phosphorothioate
  modified_base 16: mod_base = OTHER; note = 2'-O-methyluridine-3'-phosphorothioate
  modified_base 17: mod_base = OTHER; note = 2'-O-methylguanosine-3'-phosphorothioate
  modified_base 18: mod_base = OTHER; note = 2'-O-methyluridine-3'-phosphorothioate
  modified_base 19: mod_base = OTHER; note = 2'-O-methylguanosine-3'-phosphorothioate
  modified_base 20: mod_base = OTHER; note = 2'-O-methyladenosine-3'-phosphate
  misc_feature 1..5: note = RNA
  misc_feature 6..15: note = DNA
  misc_feature 16..20: note = RNA
ttcagacactaaagatgtga

SEQ ID NO: 4306 - DNA, 20 bp, synthetic construct
  source 1..20: mol_type = other DNA; note = Description of Artificial Sequence: Synthetic oligonucleotide; note = Description of Combined DNA/RNA Molecule: Synthetic oligonucleotide
  modified_base 1: mod_base = OTHER; note = 2'-O-methylcytidine-3'-phosphorothioate
  modified_base 2: mod_base = OTHER; note = 2'-O-methyladenosine-3'-phosphorothioate
  modified_base 3: mod_base = OTHER; note = 2'-O-methyluridine-3'-phosphorothioate
  modified_base 4: mod_base = OTHER; note = 2'-O-methyluridine-3'-phosphorothioate
  modified_base 5: mod_base = OTHER; note = 2'-O-methyluridine-3'-phosphorothioate
  modified_base 6: mod_base = OTHER; note = 2'-deoxyguanosine-3'-phosphorothioate
  modified_base 7: mod_base = OTHER; note = 2'-deoxyguanosine-3'-phosphorothioate
  modified_base 8: mod_base = OTHER; note = 2'-deoxyadenosine-3'-phosphorothioate
  modified_base 9: mod_base = OTHER; note = 2'-deoxythymidine-3'-phosphorothioate
  modified_base 10: mod_base = OTHER; note = 2'-deoxyadenosine-3'-phosphorothioate
  modified_base 11: mod_base = OTHER; note = 2'-deoxythymidine-3'-phosphorothioate
  modified_base 12: mod_base = OTHER; note = 2'-deoxyadenosine-3'-phosphorothioate
  modified_base 13: mod_base = OTHER; note = 2'-deoxythymidine-3'-phosphorothioate
  modified_base 14: mod_base = OTHER; note = 2'-deoxythymidine-3'-phosphorothioate
  modified_base 15: mod_base = OTHER; note = 5'-methyl-deoxycytidine-3'-phosphorothioate
  modified_base 16: mod_base = OTHER; note = 2'-O-methyladenosine-3'-phosphorothioate
  modified_base 17: mod_base = OTHER; note = 2'-O-methylguanosine-3'-phosphorothioate
  modified_base 18: mod_base = OTHER; note = 2'-O-methyladenosine-3'-phosphorothioate
  modified_base 19: mod_base = OTHER; note = 2'-O-methylcytidine-3'-phosphorothioate
  modified_base 20: mod_base = OTHER; note = 2'-O-methyladenosine-3'-phosphate
  misc_feature 1..5: note = RNA
  misc_feature 6..15: note = DNA
  misc_feature 16..20: note = RNA
catttggatatattcagaca

SEQ ID NO: 4307 - DNA, 20 bp, synthetic construct
  source 1..20: mol_type = other DNA; note = Description of Artificial Sequence: Synthetic oligonucleotide; note = Description of Combined DNA/RNA Molecule: Synthetic oligonucleotide
  modified_base 1: mod_base = OTHER; note = 2'-O-methylcytidine-3'-phosphorothioate
  modified_base 2: mod_base = OTHER; note = 2'-O-methyladenosine-3'-phosphorothioate
  modified_base 3: mod_base = OTHER; note = 2'-O-methyluridine-3'-phosphorothioate
  modified_base 4: mod_base = OTHER; note = 2'-O-methylcytidine-3'-phosphorothioate
  modified_base 5: mod_base = OTHER; note = 2'-O-methylcytidine-3'-phosphorothioate
  modified_base 6: mod_base = OTHER; note = 2'-deoxythymidine-3'-phosphorothioate
  modified_base 7: mod_base = OTHER; note = 2'-deoxyadenosine-3'-phosphorothioate
  modified_base 8: mod_base = OTHER; note = 2'-deoxyadenosine-3'-phosphorothioate
  modified_base 9: mod_base = OTHER; note = 2'-deoxyadenosine-3'-phosphorothioate
  modified_base 10: mod_base = OTHER; note = 2'-deoxyadenosine-3'-phosphorothioate
  modified_base 11: mod_base = OTHER; note = 5'-methyl-deoxycytidine-3'-phosphorothioate
  modified_base 12: mod_base = OTHER; note = 2'-deoxyadenosine-3'-phosphorothioate
  modified_base 13: mod_base = OTHER; note = 2'-deoxythymidine-3'-phosphorothioate
  modified_base 14: mod_base = OTHER; note = 2'-deoxythymidine-3'-phosphorothioate
  modified_base 15: mod_base = OTHER; note = 2'-deoxythymidine-3'-phosphorothioate
  modified_base 16: mod_base = OTHER; note = 2'-O-methylguanosine-3'-phosphorothioate
  modified_base 17: mod_base = OTHER; note = 2'-O-methylguanosine-3'-phosphorothioate
  modified_base 18: mod_base = OTHER; note = 2'-O-methyladenosine-3'-phosphorothioate
  modified_base 19: mod_base = OTHER; note = 2'-O-methyluridine-3'-phosphorothioate
  modified_base 20: mod_base = OTHER; note = 2'-O-methyladenosine-3'-phosphate
  misc_feature 1..5: note = RNA
  misc_feature 6..15: note = DNA
  misc_feature 16..20: note = RNA
catcctaaaacatttggata

SEQ ID NO: 4308 - DNA, 20 bp, synthetic construct
  source 1..20: mol_type = other DNA; note = Description of Artificial Sequence: Synthetic oligonucleotide; note = Description of Combined DNA/RNA Molecule: Synthetic oligonucleotide
  modified_base 1: mod_base = OTHER; note = 2'-O-methyladenosine-3'-phosphorothioate
  modified_base 2: mod_base = OTHER; note = 2'-O-methyladenosine-3'-phosphorothioate
  modified_base 3: mod_base = OTHER; note = 2'-O-methylguanosine-3'-phosphorothioate
  modified_base 4: mod_base = OTHER; note = 2'-O-methyluridine-3'-phosphorothioate
  modified_base 5: mod_base = OTHER; note = 2'-O-methyladenosine-3'-phosphorothioate
  modified_base 6: mod_base = OTHER; note = 2'-deoxyadenosine-3'-phosphorothioate
  modified_base 7: mod_base = OTHER; note = 5'-methyl-deoxycytidine-3'-phosphorothioate
  modified_base 8: mod_base = OTHER; note = 2'-deoxyadenosine-3'-phosphorothioate
  modified_base 9: mod_base = OTHER; note = 2'-deoxythymidine-3'-phosphorothioate
  modified_base 10: mod_base = OTHER; note = 2'-deoxyadenosine-3'-phosphorothioate
  modified_base 11: mod_base = OTHER; note = 5'-methyl-deoxycytidine-3'-phosphorothioate
  modified_base 12: mod_base = OTHER; note = 2'-deoxyadenosine-3'-phosphorothioate
  modified_base 13: mod_base = OTHER; note = 2'-deoxythymidine-3'-phosphorothioate
  modified_base 14: mod_base = OTHER; note = 5'-methyl-deoxycytidine-3'-phosphorothioate
  modified_base 15: mod_base = OTHER; note = 5'-methyl-deoxycytidine-3'-phosphorothioate
  modified_base 16: mod_base = OTHER; note = 2'-O-methyluridine-3'-phosphorothioate
  modified_base 17: mod_base = OTHER; note = 2'-O-methyladenosine-3'-phosphorothioate
  modified_base 18: mod_base = OTHER; note = 2'-O-methyladenosine-3'-phosphorothioate
  modified_base 19: mod_base = OTHER; note = 2'-O-methyladenosine-3'-phosphorothioate
  modified_base 20: mod_base = OTHER; note = 2'-O-methyladenosine-3'-phosphate
  misc_feature 1..5: note = RNA
  misc_feature 6..15: note = DNA
  misc_feature 16..20: note = RNA
aagtaacatacatcctaaaa

SEQ ID NO: 4309 - DNA, 20 bp, synthetic construct
  source 1..20: mol_type = other DNA; note = Description of Artificial Sequence: Synthetic oligonucleotide; note = Description of Combined DNA/RNA Molecule: Synthetic oligonucleotide
  modified_base 1: mod_base = OTHER; note = 2'-O-methyluridine-3'-phosphorothioate
  modified_base 2: mod_base = OTHER; note = 2'-O-methyluridine-3'-phosphorothioate
  modified_base 3: mod_base = OTHER; note = 2'-O-methyluridine-3'-phosphorothioate
  modified_base 4: mod_base = OTHER; note = 2'-O-methylcytidine-3'-phosphorothioate
  modified_base 5: mod_base = OTHER; note = 2'-O-methyluridine-3'-phosphorothioate
  modified_base 6: mod_base = OTHER; note = 5'-methyl-deoxycytidine-3'-phosphorothioate
  modified_base 7: mod_base = OTHER; note = 2'-deoxythymidine-3'-phosphorothioate
  modified_base 8: mod_base = OTHER; note = 5'-methyl-deoxycytidine-3'-phosphorothioate
  modified_base 9: mod_base = OTHER; note = 2'-deoxythymidine-3'-phosphorothioate
  modified_base 10: mod_base = OTHER; note = 2'-deoxyadenosine-3'-phosphorothioate
  modified_base 11: mod_base = OTHER; note = 2'-deoxyadenosine-3'-phosphorothioate
  modified_base 12: mod_base = OTHER; note = 2'-deoxyguanosine-3'-phosphorothioate
  modified_base 13: mod_base = OTHER; note = 2'-deoxyadenosine-3'-phosphorothioate
  modified_base 14: mod_base = OTHER; note = 2'-deoxyadenosine-3'-phosphorothioate
  modified_base 15: mod_base = OTHER; note = 2'-deoxyguanosine-3'-phosphorothioate
  modified_base 16: mod_base = OTHER; note = 2'-O-methyluridine-3'-phosphorothioate
  modified_base 17: mod_base = OTHER; note = 2'-O-methyladenosine-3'-phosphorothioate
  modified_base 18: mod_base = OTHER; note = 2'-O-methyladenosine-3'-phosphorothioate
  modified_base 19: mod_base = OTHER; note = 2'-O-methylcytidine-3'-phosphorothioate
  modified_base 20: mod_base = OTHER; note = 2'-O-methyladenosine-3'-phosphate
  misc_feature 1..5: note = RNA
  misc_feature 6..15: note = DNA
  misc_feature 16..20: note = RNA
tttctctctaagaagtaaca

SEQ ID NO: 4310 - DNA, 20 bp, synthetic construct
  source 1..20: mol_type = other DNA; note = Description of Artificial Sequence: Synthetic oligonucleotide; note = Description of Combined DNA/RNA Molecule: Synthetic oligonucleotide
  modified_base 1: mod_base = OTHER; note = 2'-O-methyladenosine-3'-phosphorothioate
  modified_base 2: mod_base = OTHER; note = 2'-O-methyladenosine-3'-phosphorothioate
  modified_base 3: mod_base = OTHER; note = 2'-O-methyladenosine-3'-phosphorothioate
  modified_base 4: mod_base = OTHER; note = 2'-O-methyluridine-3'-phosphorothioate
  modified_base 5: mod_base = OTHER; note = 2'-O-methylguanosine-3'-phosphorothioate
  modified_base 6: mod_base = OTHER; note = 5'-methyl-deoxycytidine-3'-phosphorothioate
  modified_base 7: mod_base = OTHER; note = 2'-deoxythymidine-3'-phosphorothioate
  modified_base 8: mod_base = OTHER; note = 2'-deoxythymidine-3'-phosphorothioate
  modified_base 9: mod_base = OTHER; note = 2'-deoxythymidine-3'-phosphorothioate
  modified_base 10: mod_base = OTHER; note = 2'-deoxyadenosine-3'-phosphorothioate
  modified_base 11: mod_base = OTHER; note = 2'-deoxythymidine-3'-phosphorothioate
  modified_base 12: mod_base = OTHER; note = 2'-deoxythymidine-3'-phosphorothioate
  modified_base 13: mod_base = OTHER; note = 2'-deoxythymidine-3'-phosphorothioate
  modified_base 14: mod_base = OTHER; note = 5'-methyl-deoxycytidine-3'-phosphorothioate
  modified_base 15: mod_base = OTHER; note = 2'-deoxythymidine-3'-phosphorothioate
  modified_base 16: mod_base = OTHER; note = 2'-O-methylcytidine-3'-phosphorothioate
  modified_base 17: mod_base = OTHER; note = 2'-O-methyluridine-3'-phosphorothioate
  modified_base 18: mod_base = OTHER; note = 2'-O-methylcytidine-3'-phosphorothioate
  modified_base 19: mod_base = OTHER; note = 2'-O-methyluridine-3'-phosphorothioate
  modified_base 20: mod_base = OTHER; note = 2'-O-methyladenosine-3'-phosphate
  misc_feature 1..5: note = RNA
  misc_feature 6..15: note = DNA
  misc_feature 16..20: note = RNA
aaatgctttatttctctcta

SEQ ID NO: 4311 - RNA, 21 nt, synthetic construct
  source 1..21: mol_type = other RNA; note = Description of Artificial Sequence: Synthetic oligonucleotide
  modified_base 1: mod_base = OTHER; note = 2'-fluorocytidine-3'-phosphorothioate
  modified_base 2: mod_base = OTHER; note = 2'-O-methyluridine-3'-phosphorothioate
  modified_base 3: mod_base = OTHER; note = 2'-fluorouridine-3'-phosphate
  modified_base 4: mod_base = OTHER; note = 2'-O-methyluridine-3'-phosphate
  modified_base 5: mod_base = OTHER; note = 2'-fluorouridine-3'-phosphate
  modified_base 6: mod_base = OTHER; note = 2'-O-methylcytidine-3'-phosphate
  modified_base 7: mod_base = OTHER; note = 2'-fluoroadenosine-3'-phosphate
  modified_base 8: mod_base = OTHER; note = 2'-O-methyladenosine-3'-phosphate
  modified_base 9: mod_base = OTHER; note = 2'-fluorouridine-3'-phosphate
  modified_base 10: mod_base = OTHER; note = 2'-fluoroguanosine-3'-phosphate
  modified_base 11: mod_base = OTHER; note = 2'-fluoroguanosine-3'-phosphate
  modified_base 12: mod_base = OTHER; note = 2'-O-methylguanosine-3'-phosphate
  modified_base 13: mod_base = OTHER; note = 2'-fluorouridine-3'-phosphate
  modified_base 14: mod_base = OTHER; note = 2'-O-methylguanosine-3'-phosphate
  modified_base 15: mod_base = OTHER; note = 2'-fluorouridine-3'-phosphate
  modified_base 16: mod_base = OTHER; note = 2'-O-methylcytidine-3'-phosphate
  modified_base 17: mod_base = OTHER; note = 2'-fluorocytidine-3'-phosphate
  modified_base 18: mod_base = OTHER; note = 2'-O-methyluridine-3'-phosphate
  modified_base 19: mod_base = OTHER; note = 2'-fluoroadenosine-3'-phosphate
  modified_base 20: mod_base = OTHER; note = 2'-O-methylguanosine-3'-phosphate
  modified_base 21: mod_base = OTHER; note = 2'-fluoroadenosine-3'-phosphate N-[tris(GalNAc-alkyl)-amidodecanoyl)]-4-hydroxyprolinol Hyp-(GalNAc-alkyl)3
cttttcaatgggtgtcctaga

SEQ ID NO: 4312 - RNA, 21 nt, synthetic construct
  source 1..21: mol_type = other RNA; note = Description of Artificial Sequence: Synthetic oligonucleotide
  modified_base 1: mod_base = OTHER; note = 2'-fluorouridine -3'-phosphorothioate
  modified_base 2: mod_base = OTHER; note = 2'-O-methylcytidine-3'-phosphorothioate
  modified_base 3: mod_base = OTHER; note = 2'-fluoroadenosine-3'-phosphate
  modified_base 4: mod_base = OTHER; note = 2'-O-methyladenosine-3'-phosphate
  modified_base 5: mod_base = OTHER; note = 2'-fluorouridine-3'-phosphate
  modified_base 6: mod_base = OTHER; note = 2'-O-methylguanosine-3'-phosphate
  modified_base 7: mod_base = OTHER; note = 2'-fluoroguanosine-3'-phosphate
  modified_base 8: mod_base = OTHER; note = 2'-O-methylguanosine-3'-phosphate
  modified_base 9: mod_base = OTHER; note = 2'-fluorouridine-3'-phosphate
  modified_base 10: mod_base = OTHER; note = 2'-fluoroguanosine-3'-phosphate
  modified_base 11: mod_base = OTHER; note = 2'-fluorouridine-3'-phosphate
  modified_base 12: mod_base = OTHER; note = 2'-O-methylcytidine-3'-phosphate
  modified_base 13: mod_base = OTHER; note = 2'-fluorocytidine-3'-phosphate
  modified_base 14: mod_base = OTHER; note = 2'-O-methyluridine-3'-phosphate
  modified_base 15: mod_base = OTHER; note = 2'-fluoroadenosine-3'-phosphate
  modified_base 16: mod_base = OTHER; note = 2'-O-methylguanosine-3'-phosphate
  modified_base 17: mod_base = OTHER; note = 2'-fluoroguanosine-3'-phosphate
  modified_base 18: mod_base = OTHER; note = 2'-O-methyladenosine-3'-phosphate
  modified_base 19: mod_base = OTHER; note = 2'-fluoroadenosine-3'-phosphate
  modified_base 20: mod_base = OTHER; note = 2'-O-methylcytidine-3'-phosphate
  modified_base 21: mod_base = OTHER; note = 2'-fluoroadenosine-3'-phosphate N-[tris(GalNAc-alkyl)-amidodecanoyl)]-4-hydroxyprolinol Hyp-(GalNAc-alkyl)3
tcaatgggtgtcctaggaaca

SEQ ID NO: 4313 - RNA, 21 nt, synthetic construct
  source 1..21: mol_type = other RNA; note = Description of Artificial Sequence: Synthetic oligonucleotide
  modified_base 1: mod_base = OTHER; note = 2'-fluorouridine -3'-phosphorothioate
  modified_base 2: mod_base = OTHER; note = 2'-O-methyluridine-3'-phosphorothioate
  modified_base 3: mod_base = OTHER; note = 2'-fluoroguanosine-3'-phosphate
  modified_base 4: mod_base = OTHER; note = 2'-O-methyladenosine-3'-phosphate
  modified_base 5: mod_base = OTHER; note = 2'-fluorocytidine-3'-phosphate
  modified_base 6: mod_base = OTHER; note = 2'-O-methyluridine-3'-phosphate
  modified_base 7: mod_base = OTHER; note = 2'-fluorouridine-3'-phosphate
  modified_base 8: mod_base = OTHER; note = 2'-O-methyluridine-3'-phosphate
  modified_base 9: mod_base = OTHER; note = 2'-fluorouridine-3'-phosphate
  modified_base 10: mod_base = OTHER; note = 2'-fluorocytidine-3'-phosphate
  modified_base 11: mod_base = OTHER; note = 2'-fluoroadenosine-3'-phosphate
  modified_base 12: mod_base = OTHER; note = 2'-O-methyladenosine-3'-phosphate
  modified_base 13: mod_base = OTHER; note = 2'-fluorouridine-3'-phosphate
  modified_base 14: mod_base = OTHER; note = 2'-O-methylguanosine-3'-phosphate
  modified_base 15: mod_base = OTHER; note = 2'-fluoroguanosine-3'-phosphate
  modified_base 16: mod_base = OTHER; note = 2'-O-methylguanosine-3'-phosphate
  modified_base 17: mod_base = OTHER; note = 2'-fluorouridine-3'-phosphate
  modified_base 18: mod_base = OTHER; note = 2'-O-methylguanosine-3'-phosphate
  modified_base 19: mod_base = OTHER; note = 2'-fluorouridine-3'-phosphate
  modified_base 20: mod_base = OTHER; note = 2'-O-methylcytidine-3'-phosphate
  modified_base 21: mod_base = OTHER; note = 2'-fluoroadenosine-3'-phosphate N-[tris(GalNAc-alkyl)-amidodecanoyl)]-4-hydroxyprolinol Hyp-(GalNAc-alkyl)3
ttgacttttcaatgggtgtca

SEQ ID NO: 4314 - RNA, 21 nt, synthetic construct
  source 1..21: mol_type = other RNA; note = Description of Artificial Sequence: Synthetic oligonucleotide
  modified_base 1: mod_base = OTHER; note = 2'-fluoroadenosine-3'-phosphorothioate
  modified_base 2: mod_base = OTHER; note = 2'-O-methyladenosine-3'-phosphorothioate
  modified_base 3: mod_base = OTHER; note = 2'-fluoroadenosine-3'-phosphate
  modified_base 4: mod_base = OTHER; note = 2'-O-methylguanosine-3'-phosphate
  modified_base 5: mod_base = OTHER; note = 2'-fluorouridine-3'-phosphate
  modified_base 6: mod_base = OTHER; note = 2'-O-methylcytidine-3'-phosphate
  modified_base 7: mod_base = OTHER; note = 2'-fluoroadenosine-3'-phosphate
  modified_base 8: mod_base = OTHER; note = 2'-O-methyluridine-3'-phosphate
  modified_base 9: mod_base = OTHER; note = 2'-fluorocytidine-3'-phosphate
  modified_base 10: mod_base = OTHER; note = 2'-fluoroguanosine-3'-phosphate
  modified_base 11: mod_base = OTHER; note = 2'-fluoroadenosine-3'-phosphate
  modified_base 12: mod_base = OTHER; note = 2'-O-methylcytidine-3'-phosphate
  modified_base 13: mod_base = OTHER; note = 2'-fluoroadenosine-3'-phosphate
  modified_base 14: mod_base = OTHER; note = 2'-O-methyladenosine-3'-phosphate
  modified_base 15: mod_base = OTHER; note = 2'-fluoroguanosine-3'-phosphate
  modified_base 16: mod_base = OTHER; note = 2'-O-methyladenosine-3'-phosphate
  modified_base 17: mod_base = OTHER; note = 2'-fluorocytidine-3'-phosphate
  modified_base 18: mod_base = OTHER; note = 2'-O-methyladenosine-3'-phosphate
  modified_base 19: mod_base = OTHER; note = 2'-fluorouridine-3'-phosphate
  modified_base 20: mod_base = OTHER; note = 2'-O-methyluridine-3'-phosphate
  modified_base 21: mod_base = OTHER; note = 2'-fluoroadenosine-3'-phosphate N-[tris(GalNAc-alkyl)-amidodecanoyl)]-4-hydroxyprolinol Hyp-(GalNAc-alkyl)3
aaagtcatcgacaagacatta

SEQ ID NO: 4315 - RNA, 21 nt, synthetic construct
  source 1..21: mol_type = other RNA; note = Description of Artificial Sequence: Synthetic oligonucleotide
  modified_base 1: mod_base = OTHER; note = 2'-fluorocytidine-3'-phosphorothioate
  modified_base 2: mod_base = OTHER; note = 2'-O-methyladenosine-3'-phosphorothioate
  modified_base 3: mod_base = OTHER; note = 2'-fluoroguanosine-3'-phosphate
  modified_base 4: mod_base = OTHER; note = 2'-O-methylguanosine-3'-phosphate
  modified_base 5: mod_base = OTHER; note = 2'-fluoroguanosine-3'-phosphate
  modified_base 6: mod_base = OTHER; note = 2'-O-methylguanosine-3'-phosphate
  modified_base 7: mod_base = OTHER; note = 2'-fluoroguanosine-3'-phosphate
  modified_base 8: mod_base = OTHER; note = 2'-O-methyladenosine-3'-phosphate
  modified_base 9: mod_base = OTHER; note = 2'-fluoroguanosine-3'-phosphate
  modified_base 10: mod_base = OTHER; note = 2'-fluoroadenosine-3'-phosphate
  modified_base 11: mod_base = OTHER; note = 2'-fluoroadenosine-3'-phosphate
  modified_base 12: mod_base = OTHER; note = 2'-O-methyladenosine-3'-phosphate
  modified_base 13: mod_base = OTHER; note = 2'-fluoroguanosine-3'-phosphate
  modified_base 14: mod_base = OTHER; note = 2'-O-methylguanosine-3'-phosphate
  modified_base 15: mod_base = OTHER; note = 2'-fluorouridine-3'-phosphate
  modified_base 16: mod_base = OTHER; note = 2'-O-methylguanosine-3'-phosphate
  modified_base 17: mod_base = OTHER; note = 2'-fluorouridine-3'-phosphate
  modified_base 18: mod_base = OTHER; note = 2'-O-methyluridine-3'-phosphate
  modified_base 19: mod_base = OTHER; note = 2'-fluorocytidine-3'-phosphate
  modified_base 20: mod_base = OTHER; note = 2'-O-methyladenosine-3'-phosphate
  modified_base 21: mod_base = OTHER; note = 2'-fluoroadenosine-3'-phosphate N-[tris(GalNAc-alkyl)-amidodecanoyl)]-4-hydroxyprolinol Hyp-(GalNAc-alkyl)3
cagggggagaaaggtgttcaa

SEQ ID NO: 4316 - RNA, 21 nt, synthetic construct
  source 1..21: mol_type = other RNA; note = Description of Artificial Sequence: Synthetic oligonucleotide
  modified_base 1: mod_base = OTHER; note = 2'-fluorocytidine-3'-phosphorothioate
  modified_base 2: mod_base = OTHER; note = 2'-O-methyladenosine-3'-phosphorothioate
  modified_base 3: mod_base = OTHER; note = 2'-fluorouridine-3'-phosphate
  modified_base 4: mod_base = OTHER; note = 2'-O-methyluridine-3'-phosphate
  modified_base 5: mod_base = OTHER; note = 2'-fluoroguanosine-3'-phosphate
  modified_base 6: mod_base = OTHER; note = 2'-O-methylguanosine-3'-phosphate
  modified_base 7: mod_base = OTHER; note = 2'-fluorouridine-3'-phosphate
  modified_base 8: mod_base = OTHER; note = 2'-O-methylguanosine-3'-phosphate
  modified_base 9: mod_base = OTHER; note = 2'-fluoroadenosine-3'-phosphate
  modified_base 10: mod_base = OTHER; note = 2'-fluoroguanosine-3'-phosphate
  modified_base 11: mod_base = OTHER; note = 2'-fluoroguanosine-3'-phosphate
  modified_base 12: mod_base = OTHER; note = 2'-O-methyladenosine-3'-phosphate
  modified_base 13: mod_base = OTHER; note = 2'-fluoroadenosine-3'-phosphate
  modified_base 14: mod_base = OTHER; note = 2'-O-methyladenosine-3'-phosphate
  modified_base 15: mod_base = OTHER; note = 2'-fluoroadenosine-3'-phosphate
  modified_base 16: mod_base = OTHER; note = 2'-O-methyladenosine-3'-phosphate
  modified_base 17: mod_base = OTHER; note = 2'-fluorouridine-3'-phosphate
  modified_base 18: mod_base = OTHER; note = 2'-O-methylcytidine-3'-phosphate
  modified_base 19: mod_base = OTHER; note = 2'-fluorocytidine-3'-phosphate
  modified_base 20: mod_base = OTHER; note = 2'-O-methyluridine-3'-phosphate
  modified_base 21: mod_base = OTHER; note = 2'-fluorouridine-3'-phosphate N-[tris(GalNAc-alkyl)-amidodecanoyl)]-4-hydroxyprolinol Hyp-(GalNAc-alkyl)3
cattggtgaggaaaaatcctt

SEQ ID NO: 4317 - RNA, 21 nt, synthetic construct
  source 1..21: mol_type = other RNA; note = Description of Artificial Sequence: Synthetic oligonucleotide
  modified_base 1: mod_base = OTHER; note = 2'-fluoroadenosine-3'-phosphorothioate
  modified_base 2: mod_base = OTHER; note = 2'-O-methylcytidine-3'-phosphorothioate
  modified_base 3: mod_base = OTHER; note = 2'-fluoroadenosine-3'-phosphate
  modified_base 4: mod_base = OTHER; note = 2'-O-methyluridine-3'-phosphate
  modified_base 5: mod_base = OTHER; note = 2'-fluorouridine-3'-phosphate
  modified_base 6: mod_base = OTHER; note = 2'-O-methylguanosine-3'-phosphate
  modified_base 7: mod_base = OTHER; note = 2'-fluoroguanosine-3'-phosphate
  modified_base 8: mod_base = OTHER; note = 2'-O-methyluridine-3'-phosphate
  modified_base 9: mod_base = OTHER; note = 2'-fluoroguanosine-3'-phosphate
  modified_base 10: mod_base = OTHER; note = 2'-fluoroadenosine-3'-phosphate
  modified_base 11: mod_base = OTHER; note = 2'-fluoroguanosine-3'-phosphate
  modified_base 12: mod_base = OTHER; note = 2'-O-methylguanosine-3'-phosphate
  modified_base 13: mod_base = OTHER; note = 2'-fluoroadenosine-3'-phosphate
  modified_base 14: mod_base = OTHER; note = 2'-O-methyladenosine-3'-phosphate
  modified_base 15: mod_base = OTHER; note = 2'-fluoroadenosine-3'-phosphate
  modified_base 16: mod_base = OTHER; note = 2'-O-methyladenosine-3'-phosphate
  modified_base 17: mod_base = OTHER; note = 2'-fluoroadenosine-3'-phosphate
  modified_base 18: mod_base = OTHER; note = 2'-O-methyluridine-3'-phosphate
  modified_base 19: mod_base = OTHER; note = 2'-fluorocytidine-3'-phosphate
  modified_base 20: mod_base = OTHER; note = 2'-O-methylcytidine-3'-phosphate
  modified_base 21: mod_base = OTHER; note = 2'-fluorouridine-3'-phosphate N-[tris(GalNAc-alkyl)-amidodecanoyl)]-4-hydroxyprolinol Hyp-(GalNAc-alkyl)3
acattggtgaggaaaaatcct

SEQ ID NO: 4318 - RNA, 21 nt, synthetic construct
  source 1..21: mol_type = other RNA; note = Description of Artificial Sequence: Synthetic oligonucleotide
  modified_base 1: mod_base = OTHER; note = 2'-fluoroadenosine-3'-phosphorothioate
  modified_base 2: mod_base = OTHER; note = 2'-O-methylguanosine-3'-phosphorothioate
  modified_base 3: mod_base = OTHER; note = 2'-fluoroguanosine-3'-phosphate
  modified_base 4: mod_base = OTHER; note = 2'-O-methylguanosine-3'-phosphate
  modified_base 5: mod_base = OTHER; note = 2'-fluoroguanosine-3'-phosphate
  modified_base 6: mod_base = OTHER; note = 2'-O-methylguanosine-3'-phosphate
  modified_base 7: mod_base = OTHER; note = 2'-fluoroadenosine-3'-phosphate
  modified_base 8: mod_base = OTHER; note = 2'-O-methylguanosine-3'-phosphate
  modified_base 9: mod_base = OTHER; note = 2'-fluoroadenosine-3'-phosphate
  modified_base 10: mod_base = OTHER; note = 2'-fluoroadenosine-3'-phosphate
  modified_base 11: mod_base = OTHER; note = 2'-fluoroadenosine-3'-phosphate
  modified_base 12: mod_base = OTHER; note = 2'-O-methylguanosine-3'-phosphate
  modified_base 13: mod_base = OTHER; note = 2'-fluoroguanosine-3'-phosphate
  modified_base 14: mod_base = OTHER; note = 2'-O-methyluridine-3'-phosphate
  modified_base 15: mod_base = OTHER; note = 2'-fluoroguanosine-3'-phosphate
  modified_base 16: mod_base = OTHER; note = 2'-O-methyluridine-3'-phosphate
  modified_base 17: mod_base = OTHER; note = 2'-fluorouridine-3'-phosphate
  modified_base 18: mod_base = OTHER; note = 2'-O-methylcytidine-3'-phosphate
  modified_base 19: mod_base = OTHER; note = 2'-fluoroadenosine-3'-phosphate
  modified_base 20: mod_base = OTHER; note = 2'-O-methyladenosine-3'-phosphate
  modified_base 21: mod_base = OTHER; note = 2'-fluoroadenosine-3'-phosphate N-[tris(GalNAc-alkyl)-amidodecanoyl)]-4-hydroxyprolinol Hyp-(GalNAc-alkyl)3
agggggagaaaggtgttcaaa

SEQ ID NO: 4319 - RNA, 20 nt, synthetic construct
  source 1..20: mol_type = other RNA; note = Description of Artificial Sequence: Synthetic oligonucleotide
gggagcattttcacaggtta

SEQ ID NO: 4320 - RNA, 20 nt, synthetic construct
  source 1..20: mol_type = other RNA; note = Description of Artificial Sequence: Synthetic oligonucleotide
aattagccgggggagcattt

SEQ ID NO: 4321 - RNA, 20 nt, synthetic construct
  source 1..20: mol_type = other RNA; note = Description of Artificial Sequence: Synthetic oligonucleotide
atcattgatacaaattagcc

SEQ ID NO: 4322 - RNA, 20 nt, synthetic construct
  source 1..20: mol_type = other RNA; note = Description of Artificial Sequence: Synthetic oligonucleotide
gttgttcataatcattgata

SEQ ID NO: 4323 - RNA, 20 nt, synthetic construct
  source 1..20: mol_type = other RNA; note = Description of Artificial Sequence: Synthetic oligonucleotide
gatttagcatgttgttcata

SEQ ID NO: 4324 - RNA, 20 nt, synthetic construct
  source 1..20: mol_type = other RNA; note = Description of Artificial Sequence: Synthetic oligonucleotide
ttggaagtactgatttagca

SEQ ID NO: 4325 - RNA, 20 nt, synthetic construct
  source 1..20: mol_type = other RNA; note = Description of Artificial Sequence: Synthetic oligonucleotide
catatatagactttggaagt

SEQ ID NO: 4326 - RNA, 20 nt, synthetic construct
  source 1..20: mol_type = other RNA; note = Description of Artificial Sequence: Synthetic oligonucleotide
ctgtaatagtcatatataga

SEQ ID NO: 4327 - RNA, 20 nt, synthetic construct
  source 1..20: mol_type = other RNA; note = Description of Artificial Sequence: Synthetic oligonucleotide
ttgccccagacctgtaatag

SEQ ID NO: 4328 - RNA, 20 nt, synthetic construct
  source 1..20: mol_type = other RNA; note = Description of Artificial Sequence: Synthetic oligonucleotide
ttcttcatcatttgccccag

SEQ ID NO: 4329 - RNA, 20 nt, synthetic construct
  source 1..20: mol_type = other RNA; note = Description of Artificial Sequence: Synthetic oligonucleotide
tatcagccaaagtttcttca

SEQ ID NO: 4330 - RNA, 20 nt, synthetic construct
  source 1..20: mol_type = other RNA; note = Description of Artificial Sequence: Synthetic oligonucleotide
gctgcaatattatcagccaa

SEQ ID NO: 4331 - RNA, 20 nt, synthetic construct
  source 1..20: mol_type = other RNA; note = Description of Artificial Sequence: Synthetic oligonucleotide
atctggaaaatgctgcaata

SEQ ID NO: 4332 - RNA, 20 nt, synthetic construct
  source 1..20: mol_type = other RNA; note = Description of Artificial Sequence: Synthetic oligonucleotide
gatacagcttccatctggaa

SEQ ID NO: 4333 - RNA, 20 nt, synthetic construct
  source 1..20: mol_type = other RNA; note = Description of Artificial Sequence: Synthetic oligonucleotide
gagcatccttggatacagct

SEQ ID NO: 4334 - RNA, 20 nt, synthetic construct
  source 1..20: mol_type = other RNA; note = Description of Artificial Sequence: Synthetic oligonucleotide
caacattccggagcatcctt

SEQ ID NO: 4335 - RNA, 20 nt, synthetic construct
  source 1..20: mol_type = other RNA; note = Description of Artificial Sequence: Synthetic oligonucleotide
gatctgtttcagcaacattc

SEQ ID NO: 4336 - RNA, 20 nt, synthetic construct
  source 1..20: mol_type = other RNA; note = Description of Artificial Sequence: Synthetic oligonucleotide
agaagtcgacagatctgttt

SEQ ID NO: 4337 - RNA, 20 nt, synthetic construct
  source 1..20: mol_type = other RNA; note = Description of Artificial Sequence: Synthetic oligonucleotide
tgtcctaaaacagaagtcga

SEQ ID NO: 4338 - RNA, 20 nt, synthetic construct
  source 1..20: mol_type = other RNA; note = Description of Artificial Sequence: Synthetic oligonucleotide
tgctgaccctctgtcctaaa

SEQ ID NO: 4339 - RNA, 20 nt, synthetic construct
  source 1..20: mol_type = other RNA; note = Description of Artificial Sequence: Synthetic oligonucleotide
catattggcatgctgaccct

SEQ ID NO: 4340 - RNA, 20 nt, synthetic construct
  source 1..20: mol_type = other RNA; note = Description of Artificial Sequence: Synthetic oligonucleotide
agcccccacacatattggca

SEQ ID NO: 4341 - RNA, 20 nt, synthetic construct
  source 1..20: mol_type = other RNA; note = Description of Artificial Sequence: Synthetic oligonucleotide
ctgcatggccgtagccccca

SEQ ID NO: 4342 - RNA, 20 nt, synthetic construct
  source 1..20: mol_type = other RNA; note = Description of Artificial Sequence: Synthetic oligonucleotide
gagccatgcgctgcatggcc

SEQ ID NO: 4343 - RNA, 20 nt, synthetic construct
  source 1..20: mol_type = other RNA; note = Description of Artificial Sequence: Synthetic oligonucleotide
gccgtccacatgagccatgc

SEQ ID NO: 4344 - RNA, 20 nt, synthetic construct
  source 1..20: mol_type = other RNA; note = Description of Artificial Sequence: Synthetic oligonucleotide
agtggcaagctcgccgtcca

SEQ ID NO: 4345 - RNA, 20 nt, synthetic construct
  source 1..20: mol_type = other RNA; note = Description of Artificial Sequence: Synthetic oligonucleotide
acaggctctcacagtggcaa

SEQ ID NO: 4346 - RNA, 20 nt, synthetic construct
  source 1..20: mol_type = other RNA; note = Description of Artificial Sequence: Synthetic oligonucleotide
cagggactgacaggctctca

SEQ ID NO: 4347 - RNA, 20 nt, synthetic construct
  source 1..20: mol_type = other RNA; note = Description of Artificial Sequence: Synthetic oligonucleotide
atgcccgttcccagggactg

SEQ ID NO: 4348 - RNA, 20 nt, synthetic construct
  source 1..20: mol_type = other RNA; note = Description of Artificial Sequence: Synthetic oligonucleotide
gaactcaacatcatgcccgt

SEQ ID NO: 4349 - RNA, 20 nt, synthetic construct
  source 1..20: mol_type = other RNA; note = Description of Artificial Sequence: Synthetic oligonucleotide
gaggtggcccaggaactcaa

SEQ ID NO: 4350 - RNA, 20 nt, synthetic construct
  source 1..20: mol_type = other RNA; note = Description of Artificial Sequence: Synthetic oligonucleotide
tcaattgaggaggtggccca

SEQ ID NO: 4351 - RNA, 20 nt, synthetic construct
  source 1..20: mol_type = other RNA; note = Description of Artificial Sequence: Synthetic oligonucleotide
ccgccacttcttcaattgag

SEQ ID NO: 4352 - RNA, 20 nt, synthetic construct
  source 1..20: mol_type = other RNA; note = Description of Artificial Sequence: Synthetic oligonucleotide
caggaccagcttccgccact

SEQ ID NO: 4353 - RNA, 20 nt, synthetic construct
  source 1..20: mol_type = other RNA; note = Description of Artificial Sequence: Synthetic oligonucleotide
acgaagtgcctcaggaccag

SEQ ID NO: 4354 - RNA, 20 nt, synthetic construct
  source 1..20: mol_type = other RNA; note = Description of Artificial Sequence: Synthetic oligonucleotide
cagttgcagccaacgaagtg

SEQ ID NO: 4355 - RNA, 20 nt, synthetic construct
  source 1..20: mol_type = other RNA; note = Description of Artificial Sequence: Synthetic oligonucleotide
tgtagatatacagttgcagc

SEQ ID NO: 4356 - RNA, 20 nt, synthetic construct
  source 1..20: mol_type = other RNA; note = Description of Artificial Sequence: Synthetic oligonucleotide
tctcggtccttgtagatata

SEQ ID NO: 4357 - RNA, 20 nt, synthetic construct
  source 1..20: mol_type = other RNA; note = Description of Artificial Sequence: Synthetic oligonucleotide
ttcttggtgacttctcggtc

SEQ ID NO: 4358 - RNA, 20 nt, synthetic construct
  source 1..20: mol_type = other RNA; note = Description of Artificial Sequence: Synthetic oligonucleotide
ccgcactagcttcttggtga

SEQ ID NO: 4359 - RNA, 20 nt, synthetic construct
  source 1..20: mol_type = other RNA; note = Description of Artificial Sequence: Synthetic oligonucleotide
cttctctgcctgccgcacta

SEQ ID NO: 4360 - RNA, 20 nt, synthetic construct
  source 1..20: mol_type = other RNA; note = Description of Artificial Sequence: Synthetic oligonucleotide
cttgtagcccatcttctctg

SEQ ID NO: 4361 - RNA, 20 nt, synthetic construct
  source 1..20: mol_type = other RNA; note = Description of Artificial Sequence: Synthetic oligonucleotide
aaatatggccttgtagccca

SEQ ID NO: 4362 - RNA, 20 nt, synthetic construct
  source 1..20: mol_type = other RNA; note = Description of Artificial Sequence: Synthetic oligonucleotide
tgtccactgtcacaaatatg

SEQ ID NO: 4363 - RNA, 20 nt, synthetic construct
  source 1..20: mol_type = other RNA; note = Description of Artificial Sequence: Synthetic oligonucleotide
caggtaaggtgtgtccactg

SEQ ID NO: 4364 - RNA, 20 nt, synthetic construct
  source 1..20: mol_type = other RNA; note = Description of Artificial Sequence: Synthetic oligonucleotide
gacggttgcccaggtaaggt

SEQ ID NO: 4365 - RNA, 20 nt, synthetic construct
  source 1..20: mol_type = other RNA; note = Description of Artificial Sequence: Synthetic oligonucleotide
cacatcatccagacggttgc

SEQ ID NO: 4366 - RNA, 20 nt, synthetic construct
  source 1..20: mol_type = other RNA; note = Description of Artificial Sequence: Synthetic oligonucleotide
aatctgttacgcacatcatc

SEQ ID NO: 4367 - RNA, 20 nt, synthetic construct
  source 1..20: mol_type = other RNA; note = Description of Artificial Sequence: Synthetic oligonucleotide
gcggcagtttgaatctgtta

SEQ ID NO: 4368 - RNA, 20 nt, synthetic construct
  source 1..20: mol_type = other RNA; note = Description of Artificial Sequence: Synthetic oligonucleotide
ctgagttgtggcggcagttt

SEQ ID NO: 4369 - RNA, 20 nt, synthetic construct
  source 1..20: mol_type = other RNA; note = Description of Artificial Sequence: Synthetic oligonucleotide
aaaatttttcatcctgagtt

SEQ ID NO: 4370 - RNA, 20 nt, synthetic construct
  source 1..20: mol_type = other RNA; note = Description of Artificial Sequence: Synthetic oligonucleotide
tactggtttcaaaatttttc

SEQ ID NO: 4371 - RNA, 20 nt, synthetic construct
  source 1..20: mol_type = other RNA; note = Description of Artificial Sequence: Synthetic oligonucleotide
aaatgataaagtactggttt

SEQ ID NO: 4372 - RNA, 20 nt, synthetic construct
  source 1..20: mol_type = other RNA; note = Description of Artificial Sequence: Synthetic oligonucleotide
cctcaggagaaaatgataaa

SEQ ID NO: 4373 - RNA, 20 nt, synthetic construct
  source 1..20: mol_type = other RNA; note = Description of Artificial Sequence: Synthetic oligonucleotide
tccaaaattttcctcaggag

SEQ ID NO: 4374 - RNA, 20 nt, synthetic construct
  source 1..20: mol_type = other RNA; note = Description of Artificial Sequence: Synthetic oligonucleotide
gtccactgtcgtctccaaaa

SEQ ID NO: 4375 - RNA, 20 nt, synthetic construct
  source 1..20: mol_type = other RNA; note = Description of Artificial Sequence: Synthetic oligonucleotide
atatgcagcaagtccactgt

SEQ ID NO: 4376 - RNA, 20 nt, synthetic construct
  source 1..20: mol_type = other RNA; note = Description of Artificial Sequence: Synthetic oligonucleotide
tttagccacatatgcagcaa

SEQ ID NO: 4377 - RNA, 20 nt, synthetic construct
  source 1..20: mol_type = other RNA; note = Description of Artificial Sequence: Synthetic oligonucleotide
tgggtctattgctttagcca

SEQ ID NO: 4378 - RNA, 20 nt, synthetic construct
  source 1..20: mol_type = other RNA; note = Description of Artificial Sequence: Synthetic oligonucleotide
agctgatagatgggtctatt

SEQ ID NO: 4379 - RNA, 20 nt, synthetic construct
  source 1..20: mol_type = other RNA; note = Description of Artificial Sequence: Synthetic oligonucleotide
gatatcttcccagctgatag

SEQ ID NO: 4380 - RNA, 20 nt, synthetic construct
  source 1..20: mol_type = other RNA; note = Description of Artificial Sequence: Synthetic oligonucleotide
ctcagccatttgatatcttc

SEQ ID NO: 4381 - RNA, 20 nt, synthetic construct
  source 1..20: mol_type = other RNA; note = Description of Artificial Sequence: Synthetic oligonucleotide
gatgtcagtcttctcagcca

SEQ ID NO: 4382 - RNA, 20 nt, synthetic construct
  source 1..20: mol_type = other RNA; note = Description of Artificial Sequence: Synthetic oligonucleotide
caattggcaatgatgtcagt

SEQ ID NO: 4383 - RNA, 20 nt, synthetic construct
  source 1..20: mol_type = other RNA; note = Description of Artificial Sequence: Synthetic oligonucleotide
ccctttgcaacaattggcaa

SEQ ID NO: 4384 - RNA, 20 nt, synthetic construct
  source 1..20: mol_type = other RNA; note = Description of Artificial Sequence: Synthetic oligonucleotide
ctctcaaaatgccctttgca

SEQ ID NO: 4385 - RNA, 20 nt, synthetic construct
  source 1..20: mol_type = other RNA; note = Description of Artificial Sequence: Synthetic oligonucleotide
ggcatcatcacctctcaaaa

SEQ ID NO: 4386 - RNA, 20 nt, synthetic construct
  source 1..20: mol_type = other RNA; note = Description of Artificial Sequence: Synthetic oligonucleotide
aacagcctccctggcatcat

SEQ ID NO: 4387 - RNA, 20 nt, synthetic construct
  source 1..20: mol_type = other RNA; note = Description of Artificial Sequence: Synthetic oligonucleotide
aagccatgtttaacagcctc

SEQ ID NO: 4388 - RNA, 20 nt, synthetic construct
  source 1..20: mol_type = other RNA; note = Description of Artificial Sequence: Synthetic oligonucleotide
aagatcccattcaagccatg

SEQ ID NO: 4389 - RNA, 20 nt, synthetic construct
  source 1..20: mol_type = other RNA; note = Description of Artificial Sequence: Synthetic oligonucleotide
ttcgacaccaagatcccatt

SEQ ID NO: 4390 - RNA, 20 nt, synthetic construct
  source 1..20: mol_type = other RNA; note = Description of Artificial Sequence: Synthetic oligonucleotide
tcgagccccatgattcgaca

SEQ ID NO: 4391 - RNA, 20 nt, synthetic construct
  source 1..20: mol_type = other RNA; note = Description of Artificial Sequence: Synthetic oligonucleotide
atcgagttgtcgagccccat

SEQ ID NO: 4392 - RNA, 20 nt, synthetic construct
  source 1..20: mol_type = other RNA; note = Description of Artificial Sequence: Synthetic oligonucleotide
ggctggcaccccatcgagtt

SEQ ID NO: 4393 - RNA, 20 nt, synthetic construct
  source 1..20: mol_type = other RNA; note = Description of Artificial Sequence: Synthetic oligonucleotide
aacatcaatagtggctggca

SEQ ID NO: 4394 - RNA, 20 nt, synthetic construct
  source 1..20: mol_type = other RNA; note = Description of Artificial Sequence: Synthetic oligonucleotide
atttctggcagaacatcaat

SEQ ID NO: 4395 - RNA, 20 nt, synthetic construct
  source 1..20: mol_type = other RNA; note = Description of Artificial Sequence: Synthetic oligonucleotide
agcctccacaatttctggca

SEQ ID NO: 4396 - RNA, 20 nt, synthetic construct
  source 1..20: mol_type = other RNA; note = Description of Artificial Sequence: Synthetic oligonucleotide
cttcccttccacagcctcca

SEQ ID NO: 4397 - RNA, 20 nt, synthetic construct
  source 1..20: mol_type = other RNA; note = Description of Artificial Sequence: Synthetic oligonucleotide
aagacttccaccttcccttc

SEQ ID NO: 4398 - RNA, 20 nt, synthetic construct
  source 1..20: mol_type = other RNA; note = Description of Artificial Sequence: Synthetic oligonucleotide
ccgtccaggaagacttccac

SEQ ID NO: 4399 - RNA, 20 nt, synthetic construct
  source 1..20: mol_type = other RNA; note = Description of Artificial Sequence: Synthetic oligonucleotide
tccgcacacccccgtccagg

SEQ ID NO: 4400 - RNA, 20 nt, synthetic construct
  source 1..20: mol_type = other RNA; note = Description of Artificial Sequence: Synthetic oligonucleotide
catcagtgcctttccgcaca

SEQ ID NO: 4401 - RNA, 20 nt, synthetic construct
  source 1..20: mol_type = other RNA; note = Description of Artificial Sequence: Synthetic oligonucleotide
agctttcagaacatcagtgc

SEQ ID NO: 4402 - RNA, 20 nt, synthetic construct
  source 1..20: mol_type = other RNA; note = Description of Artificial Sequence: Synthetic oligonucleotide
caagagccagagctttcaga

SEQ ID NO: 4403 - RNA, 20 nt, synthetic construct
  source 1..20: mol_type = other RNA; note = Description of Artificial Sequence: Synthetic oligonucleotide
acagccttggcgccaagagc

SEQ ID NO: 4404 - RNA, 20 nt, synthetic construct
  source 1..20: mol_type = other RNA; note = Description of Artificial Sequence: Synthetic oligonucleotide
tccccacaaacacagccttg

SEQ ID NO: 4405 - RNA, 20 nt, synthetic construct
  source 1..20: mol_type = other RNA; note = Description of Artificial Sequence: Synthetic oligonucleotide
acgattggtctccccacaaa

SEQ ID NO: 4406 - RNA, 20 nt, synthetic construct
  source 1..20: mol_type = other RNA; note = Description of Artificial Sequence: Synthetic oligonucleotide
taagccccaaacgattggtc

SEQ ID NO: 4407 - RNA, 20 nt, synthetic construct
  source 1..20: mol_type = other RNA; note = Description of Artificial Sequence: Synthetic oligonucleotide
ccctggaaagctaagcccca

SEQ ID NO: 4408 - RNA, 20 nt, synthetic construct
  source 1..20: mol_type = other RNA; note = Description of Artificial Sequence: Synthetic oligonucleotide
cacctttctccccctggaaa

SEQ ID NO: 4409 - RNA, 20 nt, synthetic construct
  source 1..20: mol_type = other RNA; note = Description of Artificial Sequence: Synthetic oligonucleotide
gacatcttgaacacctttct

SEQ ID NO: 4410 - RNA, 20 nt, synthetic construct
  source 1..20: mol_type = other RNA; note = Description of Artificial Sequence: Synthetic oligonucleotide
tagtatctcgaggacatctt

SEQ ID NO: 4411 - RNA, 20 nt, synthetic construct
  source 1..20: mol_type = other RNA; note = Description of Artificial Sequence: Synthetic oligonucleotide
gaattcttcctttagtatct

SEQ ID NO: 4412 - RNA, 20 nt, synthetic construct
  source 1..20: mol_type = other RNA; note = Description of Artificial Sequence: Synthetic oligonucleotide
ggccaaccggaattcttcct

SEQ ID NO: 4413 - RNA, 20 nt, synthetic construct
  source 1..20: mol_type = other RNA; note = Description of Artificial Sequence: Synthetic oligonucleotide
ctcagagccatggccaaccg

SEQ ID NO: 4414 - RNA, 20 nt, synthetic construct
  source 1..20: mol_type = other RNA; note = Description of Artificial Sequence: Synthetic oligonucleotide
attctggcacccactcagag

SEQ ID NO: 4415 - RNA, 20 nt, synthetic construct
  source 1..20: mol_type = other RNA; note = Description of Artificial Sequence: Synthetic oligonucleotide
atgactttcacattctggca

SEQ ID NO: 4416 - RNA, 20 nt, synthetic construct
  source 1..20: mol_type = other RNA; note = Description of Artificial Sequence: Synthetic oligonucleotide
gtcttgtcgatgactttcac

SEQ ID NO: 4417 - RNA, 20 nt, synthetic construct
  source 1..20: mol_type = other RNA; note = Description of Artificial Sequence: Synthetic oligonucleotide
tttcctcaccaatgtcttgt

SEQ ID NO: 4418 - RNA, 20 nt, synthetic construct
  source 1..20: mol_type = other RNA; note = Description of Artificial Sequence: Synthetic oligonucleotide
caaaggatttttcctcacca

SEQ ID NO: 4419 - RNA, 20 nt, synthetic construct
  source 1..20: mol_type = other RNA; note = Description of Artificial Sequence: Synthetic oligonucleotide
ttggaaacggccaaaggatt

SEQ ID NO: 4420 - RNA, 20 nt, synthetic construct
  source 1..20: mol_type = other RNA; note = Description of Artificial Sequence: Synthetic oligonucleotide
gcactgtcagatcttggaaa

SEQ ID NO: 4421 - RNA, 20 nt, synthetic construct
  source 1..20: mol_type = other RNA; note = Description of Artificial Sequence: Synthetic oligonucleotide
aaatattgtgcactgtcaga

SEQ ID NO: 4422 - RNA, 20 nt, synthetic construct
  source 1..20: mol_type = other RNA; note = Description of Artificial Sequence: Synthetic oligonucleotide
tacagatgggaaaatattgt

SEQ ID NO: 4423 - RNA, 20 nt, synthetic construct
  source 1..20: mol_type = other RNA; note = Description of Artificial Sequence: Synthetic oligonucleotide
tgaaaaaaaataatacagat

SEQ ID NO: 4424 - RNA, 20 nt, synthetic construct
  source 1..20: mol_type = other RNA; note = Description of Artificial Sequence: Synthetic oligonucleotide
taatacatgctgaaaaaaaa

SEQ ID NO: 4425 - RNA, 20 nt, synthetic construct
  source 1..20: mol_type = other RNA; note = Description of Artificial Sequence: Synthetic oligonucleotide
ctctttgtcaagtaatacat

SEQ ID NO: 4426 - RNA, 20 nt, synthetic construct
  source 1..20: mol_type = other RNA; note = Description of Artificial Sequence: Synthetic oligonucleotide
gcacagtgtctctttgtcaa

SEQ ID NO: 4427 - RNA, 20 nt, synthetic construct
  source 1..20: mol_type = other RNA; note = Description of Artificial Sequence: Synthetic oligonucleotide
tggtcaccctctgcacagtg

SEQ ID NO: 4428 - RNA, 20 nt, synthetic construct
  source 1..20: mol_type = other RNA; note = Description of Artificial Sequence: Synthetic oligonucleotide
ttacagactgtggtcaccct

SEQ ID NO: 4429 - RNA, 20 nt, synthetic construct
  source 1..20: mol_type = other RNA; note = Description of Artificial Sequence: Synthetic oligonucleotide
ttgaagtggggaattacaga

SEQ ID NO: 4430 - RNA, 20 nt, synthetic construct
  source 1..20: mol_type = other RNA; note = Description of Artificial Sequence: Synthetic oligonucleotide
ccctttgtattgaagtgggg

SEQ ID NO: 4431 - RNA, 20 nt, synthetic construct
  source 1..20: mol_type = other RNA; note = Description of Artificial Sequence: Synthetic oligonucleotide
aaagaacgacaccctttgta

SEQ ID NO: 4432 - RNA, 20 nt, synthetic construct
  source 1..20: mol_type = other RNA; note = Description of Artificial Sequence: Synthetic oligonucleotide
tattttgttggaaaagaacg

SEQ ID NO: 4433 - RNA, 20 nt, synthetic construct
  source 1..20: mol_type = other RNA; note = Description of Artificial Sequence: Synthetic oligonucleotide
aagggattgctattttgttg

SEQ ID NO: 4434 - RNA, 20 nt, synthetic construct
  source 1..20: mol_type = other RNA; note = Description of Artificial Sequence: Synthetic oligonucleotide
gcaatgaaataaaagggatt

SEQ ID NO: 4435 - RNA, 20 nt, synthetic construct
  source 1..20: mol_type = other RNA; note = Description of Artificial Sequence: Synthetic oligonucleotide
aaaagtcaaaagcaatgaaa

SEQ ID NO: 4436 - RNA, 20 nt, synthetic construct
  source 1..20: mol_type = other RNA; note = Description of Artificial Sequence: Synthetic oligonucleotide
gacacccattgaaaagtcaa

SEQ ID NO: 4437 - RNA, 20 nt, synthetic construct
  source 1..20: mol_type = other RNA; note = Description of Artificial Sequence: Synthetic oligonucleotide
aaaggttcctaggacaccca

SEQ ID NO: 4438 - RNA, 20 nt, synthetic construct
  source 1..20: mol_type = other RNA; note = Description of Artificial Sequence: Synthetic oligonucleotide
tttctttctaaaaggttcct

SEQ ID NO: 4439 - RNA, 20 nt, synthetic construct
  source 1..20: mol_type = other RNA; note = Description of Artificial Sequence: Synthetic oligonucleotide
tgaaagtccatttctttcta

SEQ ID NO: 4440 - RNA, 20 nt, synthetic construct
  source 1..20: mol_type = other RNA; note = Description of Artificial Sequence: Synthetic oligonucleotide
tatatttccaggatgaaagt

SEQ ID NO: 4441 - RNA, 20 nt, synthetic construct
  source 1..20: mol_type = other RNA; note = Description of Artificial Sequence: Synthetic oligonucleotide
taacagttaatatatttcca

SEQ ID NO: 4442 - RNA, 20 nt, synthetic construct
  source 1..20: mol_type = other RNA; note = Description of Artificial Sequence: Synthetic oligonucleotide
gttttctttttaacagttaa

SEQ ID NO: 4443 - RNA, 20 nt, synthetic construct
  source 1..20: mol_type = other RNA; note = Description of Artificial Sequence: Synthetic oligonucleotide
cacattttcaatgttttctt

SEQ ID NO: 4444 - RNA, 20 nt, synthetic construct
  source 1..20: mol_type = other RNA; note = Description of Artificial Sequence: Synthetic oligonucleotide
acgttgtctaaacacatttt

SEQ ID NO: 4445 - RNA, 20 nt, synthetic construct
  source 1..20: mol_type = other RNA; note = Description of Artificial Sequence: Synthetic oligonucleotide
caggggatgacgttgtctaa

SEQ ID NO: 4446 - RNA, 20 nt, synthetic construct
  source 1..20: mol_type = other RNA; note = Description of Artificial Sequence: Synthetic oligonucleotide
cactttagcctgccagggga

SEQ ID NO: 4447 - RNA, 20 nt, synthetic construct
  source 1..20: mol_type = other RNA; note = Description of Artificial Sequence: Synthetic oligonucleotide
aaaggatacagcactttagc

SEQ ID NO: 4448 - RNA, 20 nt, synthetic construct
  source 1..20: mol_type = other RNA; note = Description of Artificial Sequence: Synthetic oligonucleotide
caattttactaaaggataca

SEQ ID NO: 4449 - RNA, 20 nt, synthetic construct
  source 1..20: mol_type = other RNA; note = Description of Artificial Sequence: Synthetic oligonucleotide
ttgctacctccaattttact

SEQ ID NO: 4450 - RNA, 20 nt, synthetic construct
  source 1..20: mol_type = other RNA; note = Description of Artificial Sequence: Synthetic oligonucleotide
caccttagtgtttgctacct

SEQ ID NO: 4451 - RNA, 20 nt, synthetic construct
  source 1..20: mol_type = other RNA; note = Description of Artificial Sequence: Synthetic oligonucleotide
tcattatcttttcaccttag

SEQ ID NO: 4452 - RNA, 20 nt, synthetic construct
  source 1..20: mol_type = other RNA; note = Description of Artificial Sequence: Synthetic oligonucleotide
aacaatgagatcattatctt

SEQ ID NO: 4453 - RNA, 20 nt, synthetic construct
  source 1..20: mol_type = other RNA; note = Description of Artificial Sequence: Synthetic oligonucleotide
tacaggttaataaacaatga

SEQ ID NO: 4454 - RNA, 20 nt, synthetic construct
  source 1..20: mol_type = other RNA; note = Description of Artificial Sequence: Synthetic oligonucleotide
gtaaacagaatacaggttaa

SEQ ID NO: 4455 - RNA, 20 nt, synthetic construct
  source 1..20: mol_type = other RNA; note = Description of Artificial Sequence: Synthetic oligonucleotide
tttaaagacatgtaaacaga

SEQ ID NO: 4456 - RNA, 20 nt, synthetic construct
  source 1..20: mol_type = other RNA; note = Description of Artificial Sequence: Synthetic oligonucleotide
aagaaccactgttttaaaga

SEQ ID NO: 4457 - RNA, 20 nt, synthetic construct
  source 1..20: mol_type = other RNA; note = Description of Artificial Sequence: Synthetic oligonucleotide
cttacaatttaagaaccact

SEQ ID NO: 4458 - RNA, 20 nt, synthetic construct
  source 1..20: mol_type = other RNA; note = Description of Artificial Sequence: Synthetic oligonucleotide
ctttgaacctgagcttacaa

SEQ ID NO: 4459 - RNA, 20 nt, synthetic construct
  source 1..20: mol_type = other RNA; note = Description of Artificial Sequence: Synthetic oligonucleotide
attaccaacactttgaacct

SEQ ID NO: 4460 - RNA, 20 nt, synthetic construct
  source 1..20: mol_type = other RNA; note = Description of Artificial Sequence: Synthetic oligonucleotide
tgtgaatcaggcattaccaa

SEQ ID NO: 4461 - RNA, 20 nt, synthetic construct
  source 1..20: mol_type = other RNA; note = Description of Artificial Sequence: Synthetic oligonucleotide
tctcaaagttgtgaatcagg

SEQ ID NO: 4462 - RNA, 20 nt, synthetic construct
  source 1..20: mol_type = other RNA; note = Description of Artificial Sequence: Synthetic oligonucleotide
cagtgctaccttctcaaagt

SEQ ID NO: 4463 - RNA, 20 nt, synthetic construct
  source 1..20: mol_type = other RNA; note = Description of Artificial Sequence: Synthetic oligonucleotide
ttccaattctctccagtgct

SEQ ID NO: 4464 - RNA, 20 nt, synthetic construct
  source 1..20: mol_type = other RNA; note = Description of Artificial Sequence: Synthetic oligonucleotide
ccgccacccattccaattct

SEQ ID NO: 4465 - RNA, 20 nt, synthetic construct
  source 1..20: mol_type = other RNA; note = Description of Artificial Sequence: Synthetic oligonucleotide
tcaccaattaccgccaccca

SEQ ID NO: 4466 - RNA, 20 nt, synthetic construct
  source 1..20: mol_type = other RNA; note = Description of Artificial Sequence: Synthetic oligonucleotide
attcaaagaagtatcaccaa

SEQ ID NO: 4467 - RNA, 20 nt, synthetic construct
  source 1..20: mol_type = other RNA; note = Description of Artificial Sequence: Synthetic oligonucleotide
tggaaatctacattcaaaga

SEQ ID NO: 4468 - RNA, 20 nt, synthetic construct
  source 1..20: mol_type = other RNA; note = Description of Artificial Sequence: Synthetic oligonucleotide
aagatgtgattggaaatcta

SEQ ID NO: 4469 - RNA, 20 nt, synthetic construct
  source 1..20: mol_type = other RNA; note = Description of Artificial Sequence: Synthetic oligonucleotide
ttcagacactaaagatgtga

SEQ ID NO: 4470 - RNA, 20 nt, synthetic construct
  source 1..20: mol_type = other RNA; note = Description of Artificial Sequence: Synthetic oligonucleotide
catttggatatattcagaca

SEQ ID NO: 4471 - RNA, 20 nt, synthetic construct
  source 1..20: mol_type = other RNA; note = Description of Artificial Sequence: Synthetic oligonucleotide
catcctaaaacatttggata

SEQ ID NO: 4472 - RNA, 20 nt, synthetic construct
  source 1..20: mol_type = other RNA; note = Description of Artificial Sequence: Synthetic oligonucleotide
aagtaacatacatcctaaaa

SEQ ID NO: 4473 - RNA, 20 nt, synthetic construct
  source 1..20: mol_type = other RNA; note = Description of Artificial Sequence: Synthetic oligonucleotide
tttctctctaagaagtaaca

SEQ ID NO: 4474 - RNA, 20 nt, synthetic construct
  source 1..20: mol_type = other RNA; note = Description of Artificial Sequence: Synthetic oligonucleotide
aaatgctttatttctctcta

SEQ ID NO: 4475 - RNA, 20 nt, unidentified
  source 1..20: mol_type = unassigned RNA; note = Description of Unknown: target sequence
taacctgtgaaaatgctccc

SEQ ID NO: 4476 - RNA, 20 nt, unidentified
  source 1..20: mol_type = unassigned RNA; note = Description of Unknown: target sequence
aaatgctcccccggctaatt

SEQ ID NO: 4477 - RNA, 20 nt, unidentified
  source 1..20: mol_type = unassigned RNA; note = Description of Unknown: target sequence
ggctaatttgtatcaatgat

SEQ ID NO: 4478 - RNA, 20 nt, unidentified
  source 1..20: mol_type = unassigned RNA; note = Description of Unknown: target sequence
tatcaatgattatgaacaac

SEQ ID NO: 4479 - RNA, 20 nt, unidentified
  source 1..20: mol_type = unassigned RNA; note = Description of Unknown: target sequence
tatgaacaacatgctaaatc

SEQ ID NO: 4480 - RNA, 20 nt, unidentified
  source 1..20: mol_type = unassigned RNA; note = Description of Unknown: target sequence
tgctaaatcagtacttccaa

SEQ ID NO: 4481 - RNA, 20 nt, unidentified
  source 1..20: mol_type = unassigned RNA; note = Description of Unknown: target sequence
acttccaaagtctatatatg

SEQ ID NO: 4482 - RNA, 20 nt, unidentified
  source 1..20: mol_type = unassigned RNA; note = Description of Unknown: target sequence
tctatatatgactattacag

SEQ ID NO: 4483 - RNA, 20 nt, unidentified
  source 1..20: mol_type = unassigned RNA; note = Description of Unknown: target sequence
ctattacaggtctggggcaa

SEQ ID NO: 4484 - RNA, 20 nt, unidentified
  source 1..20: mol_type = unassigned RNA; note = Description of Unknown: target sequence
ctggggcaaatgatgaagaa

SEQ ID NO: 4485 - RNA, 20 nt, unidentified
  source 1..20: mol_type = unassigned RNA; note = Description of Unknown: target sequence
tgaagaaactttggctgata

SEQ ID NO: 4486 - RNA, 20 nt, unidentified
  source 1..20: mol_type = unassigned RNA; note = Description of Unknown: target sequence
ttggctgataatattgcagc

SEQ ID NO: 4487 - RNA, 20 nt, unidentified
  source 1..20: mol_type = unassigned RNA; note = Description of Unknown: target sequence
tattgcagcattttccagat

SEQ ID NO: 4488 - RNA, 20 nt, unidentified
  source 1..20: mol_type = unassigned RNA; note = Description of Unknown: target sequence
ttccagatggaagctgtatc

SEQ ID NO: 4489 - RNA, 20 nt, unidentified
  source 1..20: mol_type = unassigned RNA; note = Description of Unknown: target sequence
agctgtatccaaggatgctc

SEQ ID NO: 4490 - RNA, 20 nt, unidentified
  source 1..20: mol_type = unassigned RNA; note = Description of Unknown: target sequence
aaggatgctccggaatgttg

SEQ ID NO: 4491 - RNA, 20 nt, unidentified
  source 1..20: mol_type = unassigned RNA; note = Description of Unknown: target sequence
gaatgttgctgaaacagatc

SEQ ID NO: 4492 - RNA, 20 nt, unidentified
  source 1..20: mol_type = unassigned RNA; note = Description of Unknown: target sequence
aaacagatctgtcgacttct

SEQ ID NO: 4493 - RNA, 20 nt, unidentified
  source 1..20: mol_type = unassigned RNA; note = Description of Unknown: target sequence
tcgacttctgttttaggaca

SEQ ID NO: 4494 - RNA, 20 nt, unidentified
  source 1..20: mol_type = unassigned RNA; note = Description of Unknown: target sequence
tttaggacagagggtcagca

SEQ ID NO: 4495 - RNA, 20 nt, unidentified
  source 1..20: mol_type = unassigned RNA; note = Description of Unknown: target sequence
agggtcagcatgccaatatg

SEQ ID NO: 4496 - RNA, 20 nt, unidentified
  source 1..20: mol_type = unassigned RNA; note = Description of Unknown: target sequence
tgccaatatgtgtgggggct

SEQ ID NO: 4497 - RNA, 20 nt, unidentified
  source 1..20: mol_type = unassigned RNA; note = Description of Unknown: target sequence
tgggggctacggccatgcag

SEQ ID NO: 4498 - RNA, 20 nt, unidentified
  source 1..20: mol_type = unassigned RNA; note = Description of Unknown: target sequence
ggccatgcagcgcatggctc

SEQ ID NO: 4499 - RNA, 20 nt, unidentified
  source 1..20: mol_type = unassigned RNA; note = Description of Unknown: target sequence
gcatggctcatgtggacggc

SEQ ID NO: 4500 - RNA, 20 nt, unidentified
  source 1..20: mol_type = unassigned RNA; note = Description of Unknown: target sequence
tggacggcgagcttgccact

SEQ ID NO: 4501 - RNA, 20 nt, unidentified
  source 1..20: mol_type = unassigned RNA; note = Description of Unknown: target sequence
ttgccactgtgagagcctgt

SEQ ID NO: 4502 - RNA, 20 nt, unidentified
  source 1..20: mol_type = unassigned RNA; note = Description of Unknown: target sequence
tgagagcctgtcagtccctg

SEQ ID NO: 4503 - RNA, 20 nt, unidentified
  source 1..20: mol_type = unassigned RNA; note = Description of Unknown: target sequence
cagtccctgggaacgggcat

SEQ ID NO: 4504 - RNA, 20 nt, unidentified
  source 1..20: mol_type = unassigned RNA; note = Description of Unknown: target sequence
acgggcatgatgttgagttc

SEQ ID NO: 4505 - RNA, 20 nt, unidentified
  source 1..20: mol_type = unassigned RNA; note = Description of Unknown: target sequence
ttgagttcctgggccacctc

SEQ ID NO: 4506 - RNA, 20 nt, unidentified
  source 1..20: mol_type = unassigned RNA; note = Description of Unknown: target sequence
tgggccacctcctcaattga

SEQ ID NO: 4507 - RNA, 20 nt, unidentified
  source 1..20: mol_type = unassigned RNA; note = Description of Unknown: target sequence
ctcaattgaagaagtggcgg

SEQ ID NO: 4508 - RNA, 20 nt, unidentified
  source 1..20: mol_type = unassigned RNA; note = Description of Unknown: target sequence
agtggcggaagctggtcctg

SEQ ID NO: 4509 - RNA, 20 nt, unidentified
  source 1..20: mol_type = unassigned RNA; note = Description of Unknown: target sequence
ctggtcctgaggcacttcgt

SEQ ID NO: 4510 - RNA, 20 nt, unidentified
  source 1..20: mol_type = unassigned RNA; note = Description of Unknown: target sequence
cacttcgttggctgcaactg

SEQ ID NO: 4511 - RNA, 20 nt, unidentified
  source 1..20: mol_type = unassigned RNA; note = Description of Unknown: target sequence
gctgcaactgtatatctaca

SEQ ID NO: 4512 - RNA, 20 nt, unidentified
  source 1..20: mol_type = unassigned RNA; note = Description of Unknown: target sequence
tatatctacaaggaccgaga

SEQ ID NO: 4513 - RNA, 20 nt, unidentified
  source 1..20: mol_type = unassigned RNA; note = Description of Unknown: target sequence
gaccgagaagtcaccaagaa

SEQ ID NO: 4514 - RNA, 20 nt, unidentified
  source 1..20: mol_type = unassigned RNA; note = Description of Unknown: target sequence
tcaccaagaagctagtgcgg

SEQ ID NO: 4515 - RNA, 20 nt, unidentified
  source 1..20: mol_type = unassigned RNA; note = Description of Unknown: target sequence
tagtgcggcaggcagagaag

SEQ ID NO: 4516 - RNA, 20 nt, unidentified
  source 1..20: mol_type = unassigned RNA; note = Description of Unknown: target sequence
cagagaagatgggctacaag

SEQ ID NO: 4517 - RNA, 20 nt, unidentified
  source 1..20: mol_type = unassigned RNA; note = Description of Unknown: target sequence
tgggctacaaggccatattt

SEQ ID NO: 4518 - RNA, 20 nt, unidentified
  source 1..20: mol_type = unassigned RNA; note = Description of Unknown: target sequence
catatttgtgacagtggaca

SEQ ID NO: 4519 - RNA, 20 nt, unidentified
  source 1..20: mol_type = unassigned RNA; note = Description of Unknown: target sequence
cagtggacacaccttacctg

SEQ ID NO: 4520 - RNA, 20 nt, unidentified
  source 1..20: mol_type = unassigned RNA; note = Description of Unknown: target sequence
accttacctgggcaaccgtc

SEQ ID NO: 4521 - RNA, 20 nt, unidentified
  source 1..20: mol_type = unassigned RNA; note = Description of Unknown: target sequence
gcaaccgtctggatgatgtg

SEQ ID NO: 4522 - RNA, 20 nt, unidentified
  source 1..20: mol_type = unassigned RNA; note = Description of Unknown: target sequence
gatgatgtgcgtaacagatt

SEQ ID NO: 4523 - RNA, 20 nt, unidentified
  source 1..20: mol_type = unassigned RNA; note = Description of Unknown: target sequence
taacagattcaaactgccgc

SEQ ID NO: 4524 - RNA, 20 nt, unidentified
  source 1..20: mol_type = unassigned RNA; note = Description of Unknown: target sequence
aaactgccgccacaactcag

SEQ ID NO: 4525 - RNA, 20 nt, unidentified
  source 1..20: mol_type = unassigned RNA; note = Description of Unknown: target sequence
aactcaggatgaaaaatttt

SEQ ID NO: 4526 - RNA, 20 nt, unidentified
  source 1..20: mol_type = unassigned RNA; note = Description of Unknown: target sequence
gaaaaattttgaaaccagta

SEQ ID NO: 4527 - RNA, 20 nt, unidentified
  source 1..20: mol_type = unassigned RNA; note = Description of Unknown: target sequence
aaaccagtactttatcattt

SEQ ID NO: 4528 - RNA, 20 nt, unidentified
  source 1..20: mol_type = unassigned RNA; note = Description of Unknown: target sequence
tttatcattttctcctgagg

SEQ ID NO: 4529 - RNA, 20 nt, unidentified
  source 1..20: mol_type = unassigned RNA; note = Description of Unknown: target sequence
ctcctgaggaaaattttgga

SEQ ID NO: 4530 - RNA, 20 nt, unidentified
  source 1..20: mol_type = unassigned RNA; note = Description of Unknown: target sequence
ttttggagacgacagtggac

SEQ ID NO: 4531 - RNA, 20 nt, unidentified
  source 1..20: mol_type = unassigned RNA; note = Description of Unknown: target sequence
acagtggacttgctgcatat

SEQ ID NO: 4532 - RNA, 20 nt, unidentified
  source 1..20: mol_type = unassigned RNA; note = Description of Unknown: target sequence
ttgctgcatatgtggctaaa

SEQ ID NO: 4533 - RNA, 20 nt, unidentified
  source 1..20: mol_type = unassigned RNA; note = Description of Unknown: target sequence
tggctaaagcaatagaccca

SEQ ID NO: 4534 - RNA, 20 nt, unidentified
  source 1..20: mol_type = unassigned RNA; note = Description of Unknown: target sequence
aatagacccatctatcagct

SEQ ID NO: 4535 - RNA, 20 nt, unidentified
  source 1..20: mol_type = unassigned RNA; note = Description of Unknown: target sequence
ctatcagctgggaagatatc

SEQ ID NO: 4536 - RNA, 20 nt, unidentified
  source 1..20: mol_type = unassigned RNA; note = Description of Unknown: target sequence
gaagatatcaaatggctgag

SEQ ID NO: 4537 - RNA, 20 nt, unidentified
  source 1..20: mol_type = unassigned RNA; note = Description of Unknown: target sequence
tggctgagaagactgacatc

SEQ ID NO: 4538 - RNA, 20 nt, unidentified
  source 1..20: mol_type = unassigned RNA; note = Description of Unknown: target sequence
actgacatcattgccaattg

SEQ ID NO: 4539 - RNA, 20 nt, unidentified
  source 1..20: mol_type = unassigned RNA; note = Description of Unknown: target sequence
ttgccaattgttgcaaaggg

SEQ ID NO: 4540 - RNA, 20 nt, unidentified
  source 1..20: mol_type = unassigned RNA; note = Description of Unknown: target sequence
tgcaaagggcattttgagag

SEQ ID NO: 4541 - RNA, 20 nt, unidentified
  source 1..20: mol_type = unassigned RNA; note = Description of Unknown: target sequence
ttttgagaggtgatgatgcc

SEQ ID NO: 4542 - RNA, 20 nt, unidentified
  source 1..20: mol_type = unassigned RNA; note = Description of Unknown: target sequence
atgatgccagggaggctgtt

SEQ ID NO: 4543 - RNA, 20 nt, unidentified
  source 1..20: mol_type = unassigned RNA; note = Description of Unknown: target sequence
gaggctgttaaacatggctt

SEQ ID NO: 4544 - RNA, 20 nt, unidentified
  source 1..20: mol_type = unassigned RNA; note = Description of Unknown: target sequence
catggcttgaatgggatctt

SEQ ID NO: 4545 - RNA, 20 nt, unidentified
  source 1..20: mol_type = unassigned RNA; note = Description of Unknown: target sequence
aatgggatcttggtgtcgaa

SEQ ID NO: 4546 - RNA, 20 nt, unidentified
  source 1..20: mol_type = unassigned RNA; note = Description of Unknown: target sequence
atggggctcgacaactcgat

SEQ ID NO: 4547 - RNA, 20 nt, unidentified
  source 1..20: mol_type = unassigned RNA; note = Description of Unknown: target sequence
tgtcgaatcatggggctcga

SEQ ID NO: 4548 - RNA, 20 nt, unidentified
  source 1..20: mol_type = unassigned RNA; note = Description of Unknown: target sequence
aactcgatggggtgccagcc

SEQ ID NO: 4549 - RNA, 20 nt, unidentified
  source 1..20: mol_type = unassigned RNA; note = Description of Unknown: target sequence
tgccagccactattgatgtt

SEQ ID NO: 4550 - RNA, 20 nt, unidentified
  source 1..20: mol_type = unassigned RNA; note = Description of Unknown: target sequence
attgatgttctgccagaaat

SEQ ID NO: 4551 - RNA, 20 nt, unidentified
  source 1..20: mol_type = unassigned RNA; note = Description of Unknown: target sequence
tgccagaaattgtggaggct

SEQ ID NO: 4552 - RNA, 20 nt, unidentified
  source 1..20: mol_type = unassigned RNA; note = Description of Unknown: target sequence
tggaggctgtggaagggaag

SEQ ID NO: 4553 - RNA, 20 nt, unidentified
  source 1..20: mol_type = unassigned RNA; note = Description of Unknown: target sequence
gaagggaaggtggaagtctt

SEQ ID NO: 4554 - RNA, 20 nt, unidentified
  source 1..20: mol_type = unassigned RNA; note = Description of Unknown: target sequence
gtggaagtcttcctggacgg

SEQ ID NO: 4555 - RNA, 20 nt, unidentified
  source 1..20: mol_type = unassigned RNA; note = Description of Unknown: target sequence
cctggacgggggtgtgcgga

SEQ ID NO: 4556 - RNA, 20 nt, unidentified
  source 1..20: mol_type = unassigned RNA; note = Description of Unknown: target sequence
tgtgcggaaaggcactgatg

SEQ ID NO: 4557 - RNA, 20 nt, unidentified
  source 1..20: mol_type = unassigned RNA; note = Description of Unknown: target sequence
gcactgatgttctgaaagct

SEQ ID NO: 4558 - RNA, 20 nt, unidentified
  source 1..20: mol_type = unassigned RNA; note = Description of Unknown: target sequence
tctgaaagctctggctcttg

SEQ ID NO: 4559 - RNA, 20 nt, unidentified
  source 1..20: mol_type = unassigned RNA; note = Description of Unknown: target sequence
gctcttggcgccaaggctgt

SEQ ID NO: 4560 - RNA, 20 nt, unidentified
  source 1..20: mol_type = unassigned RNA; note = Description of Unknown: target sequence
caaggctgtgtttgtgggga

SEQ ID NO: 4561 - RNA, 20 nt, unidentified
  source 1..20: mol_type = unassigned RNA; note = Description of Unknown: target sequence
tttgtggggagaccaatcgt

SEQ ID NO: 4562 - RNA, 20 nt, unidentified
  source 1..20: mol_type = unassigned RNA; note = Description of Unknown: target sequence
gaccaatcgtttggggctta

SEQ ID NO: 4563 - RNA, 20 nt, unidentified
  source 1..20: mol_type = unassigned RNA; note = Description of Unknown: target sequence
tggggcttagctttccaggg

SEQ ID NO: 4564 - RNA, 20 nt, unidentified
  source 1..20: mol_type = unassigned RNA; note = Description of Unknown: target sequence
tttccagggggagaaaggtg

SEQ ID NO: 4565 - RNA, 20 nt, unidentified
  source 1..20: mol_type = unassigned RNA; note = Description of Unknown: target sequence
agaaaggtgttcaagatgtc

SEQ ID NO: 4566 - RNA, 20 nt, unidentified
  source 1..20: mol_type = unassigned RNA; note = Description of Unknown: target sequence
aagatgtcctcgagatacta

SEQ ID NO: 4567 - RNA, 20 nt, unidentified
  source 1..20: mol_type = unassigned RNA; note = Description of Unknown: target sequence
agatactaaaggaagaattc

SEQ ID NO: 4568 - RNA, 20 nt, unidentified
  source 1..20: mol_type = unassigned RNA; note = Description of Unknown: target sequence
aggaagaattccggttggcc

SEQ ID NO: 4569 - RNA, 20 nt, unidentified
  source 1..20: mol_type = unassigned RNA; note = Description of Unknown: target sequence
cggttggccatggctctgag

SEQ ID NO: 4570 - RNA, 20 nt, unidentified
  source 1..20: mol_type = unassigned RNA; note = Description of Unknown: target sequence
ctctgagtgggtgccagaat

SEQ ID NO: 4571 - RNA, 20 nt, unidentified
  source 1..20: mol_type = unassigned RNA; note = Description of Unknown: target sequence
tgccagaatgtgaaagtcat

SEQ ID NO: 4572 - RNA, 20 nt, unidentified
  source 1..20: mol_type = unassigned RNA; note = Description of Unknown: target sequence
gtgaaagtcatcgacaagac

SEQ ID NO: 4573 - RNA, 20 nt, unidentified
  source 1..20: mol_type = unassigned RNA; note = Description of Unknown: target sequence
acaagacattggtgaggaaa

SEQ ID NO: 4574 - RNA, 20 nt, unidentified
  source 1..20: mol_type = unassigned RNA; note = Description of Unknown: target sequence
tggtgaggaaaaatcctttg

SEQ ID NO: 4575 - RNA, 20 nt, unidentified
  source 1..20: mol_type = unassigned RNA; note = Description of Unknown: target sequence
aatcctttggccgtttccaa

SEQ ID NO: 4576 - RNA, 20 nt, unidentified
  source 1..20: mol_type = unassigned RNA; note = Description of Unknown: target sequence
tttccaagatctgacagtgc

SEQ ID NO: 4577 - RNA, 20 nt, unidentified
  source 1..20: mol_type = unassigned RNA; note = Description of Unknown: target sequence
tctgacagtgcacaatattt

SEQ ID NO: 4578 - RNA, 20 nt, unidentified
  source 1..20: mol_type = unassigned RNA; note = Description of Unknown: target sequence
acaatattttcccatctgta

SEQ ID NO: 4579 - RNA, 20 nt, unidentified
  source 1..20: mol_type = unassigned RNA; note = Description of Unknown: target sequence
atctgtattattttttttca

SEQ ID NO: 4580 - RNA, 20 nt, unidentified
  source 1..20: mol_type = unassigned RNA; note = Description of Unknown: target sequence
ttttttttcagcatgtatta

SEQ ID NO: 4581 - RNA, 20 nt, unidentified
  source 1..20: mol_type = unassigned RNA; note = Description of Unknown: target sequence
atgtattacttgacaaagag

SEQ ID NO: 4582 - RNA, 20 nt, unidentified
  source 1..20: mol_type = unassigned RNA; note = Description of Unknown: target sequence
ttgacaaagagacactgtgc

SEQ ID NO: 4583 - RNA, 20 nt, unidentified
  source 1..20: mol_type = unassigned RNA; note = Description of Unknown: target sequence
cactgtgcagagggtgacca

SEQ ID NO: 4584 - RNA, 20 nt, unidentified
  source 1..20: mol_type = unassigned RNA; note = Description of Unknown: target sequence
agggtgaccacagtctgtaa

SEQ ID NO: 4585 - RNA, 20 nt, unidentified
  source 1..20: mol_type = unassigned RNA; note = Description of Unknown: target sequence
tctgtaattccccacttcaa

SEQ ID NO: 4586 - RNA, 20 nt, unidentified
  source 1..20: mol_type = unassigned RNA; note = Description of Unknown: target sequence
ccccacttcaatacaaaggg

SEQ ID NO: 4587 - RNA, 20 nt, unidentified
  source 1..20: mol_type = unassigned RNA; note = Description of Unknown: target sequence
tacaaagggtgtcgttcttt

SEQ ID NO: 4588 - RNA, 20 nt, unidentified
  source 1..20: mol_type = unassigned RNA; note = Description of Unknown: target sequence
cgttcttttccaacaaaata

SEQ ID NO: 4589 - RNA, 20 nt, unidentified
  source 1..20: mol_type = unassigned RNA; note = Description of Unknown: target sequence
caacaaaatagcaatccctt

SEQ ID NO: 4590 - RNA, 20 nt, unidentified
  source 1..20: mol_type = unassigned RNA; note = Description of Unknown: target sequence
aatcccttttatttcattgc

SEQ ID NO: 4591 - RNA, 20 nt, unidentified
  source 1..20: mol_type = unassigned RNA; note = Description of Unknown: target sequence
tttcattgcttttgactttt

SEQ ID NO: 4592 - RNA, 20 nt, unidentified
  source 1..20: mol_type = unassigned RNA; note = Description of Unknown: target sequence
ttgacttttcaatgggtgtc

SEQ ID NO: 4593 - RNA, 20 nt, unidentified
  source 1..20: mol_type = unassigned RNA; note = Description of Unknown: target sequence
tgggtgtcctaggaaccttt

SEQ ID NO: 4594 - RNA, 20 nt, unidentified
  source 1..20: mol_type = unassigned RNA; note = Description of Unknown: target sequence
aggaaccttttagaaagaaa

SEQ ID NO: 4595 - RNA, 20 nt, unidentified
  source 1..20: mol_type = unassigned RNA; note = Description of Unknown: target sequence
tagaaagaaatggactttca

SEQ ID NO: 4596 - RNA, 20 nt, unidentified
  source 1..20: mol_type = unassigned RNA; note = Description of Unknown: target sequence
actttcatcctggaaatata

SEQ ID NO: 4597 - RNA, 20 nt, unidentified
  source 1..20: mol_type = unassigned RNA; note = Description of Unknown: target sequence
tggaaatatattaactgtta

SEQ ID NO: 4598 - RNA, 20 nt, unidentified
  source 1..20: mol_type = unassigned RNA; note = Description of Unknown: target sequence
ttaactgttaaaaagaaaac

SEQ ID NO: 4599 - RNA, 20 nt, unidentified
  source 1..20: mol_type = unassigned RNA; note = Description of Unknown: target sequence
aagaaaacattgaaaatgtg

SEQ ID NO: 4600 - RNA, 20 nt, unidentified
  source 1..20: mol_type = unassigned RNA; note = Description of Unknown: target sequence
aaaatgtgtttagacaacgt

SEQ ID NO: 4601 - RNA, 20 nt, unidentified
  source 1..20: mol_type = unassigned RNA; note = Description of Unknown: target sequence
ttagacaacgtcatcccctg

SEQ ID NO: 4602 - RNA, 20 nt, unidentified
  source 1..20: mol_type = unassigned RNA; note = Description of Unknown: target sequence
tcccctggcaggctaaagtg

SEQ ID NO: 4603 - RNA, 20 nt, unidentified
  source 1..20: mol_type = unassigned RNA; note = Description of Unknown: target sequence
gctaaagtgctgtatccttt

SEQ ID NO: 4604 - RNA, 20 nt, unidentified
  source 1..20: mol_type = unassigned RNA; note = Description of Unknown: target sequence
tgtatcctttagtaaaattg

SEQ ID NO: 4605 - RNA, 20 nt, unidentified
  source 1..20: mol_type = unassigned RNA; note = Description of Unknown: target sequence
agtaaaattggaggtagcaa

SEQ ID NO: 4606 - RNA, 20 nt, unidentified
  source 1..20: mol_type = unassigned RNA; note = Description of Unknown: target sequence
aggtagcaaacactaaggtg

SEQ ID NO: 4607 - RNA, 20 nt, unidentified
  source 1..20: mol_type = unassigned RNA; note = Description of Unknown: target sequence
ctaaggtgaaaagataatga

SEQ ID NO: 4608 - RNA, 20 nt, unidentified
  source 1..20: mol_type = unassigned RNA; note = Description of Unknown: target sequence
aagataatgatctcattgtt

SEQ ID NO: 4609 - RNA, 20 nt, unidentified
  source 1..20: mol_type = unassigned RNA; note = Description of Unknown: target sequence
tcattgtttattaacctgta

SEQ ID NO: 4610 - RNA, 20 nt, unidentified
  source 1..20: mol_type = unassigned RNA; note = Description of Unknown: target sequence
ttaacctgtattctgtttac

SEQ ID NO: 4611 - RNA, 20 nt, unidentified
  source 1..20: mol_type = unassigned RNA; note = Description of Unknown: target sequence
tctgtttacatgtctttaaa

SEQ ID NO: 4612 - RNA, 20 nt, unidentified
  source 1..20: mol_type = unassigned RNA; note = Description of Unknown: target sequence
tctttaaaacagtggttctt

SEQ ID NO: 4613 - RNA, 20 nt, unidentified
  source 1..20: mol_type = unassigned RNA; note = Description of Unknown: target sequence
agtggttcttaaattgtaag

SEQ ID NO: 4614 - RNA, 20 nt, unidentified
  source 1..20: mol_type = unassigned RNA; note = Description of Unknown: target sequence
ttgtaagctcaggttcaaag

SEQ ID NO: 4615 - RNA, 20 nt, unidentified
  source 1..20: mol_type = unassigned RNA; note = Description of Unknown: target sequence
aggttcaaagtgttggtaat

SEQ ID NO: 4616 - RNA, 20 nt, unidentified
  source 1..20: mol_type = unassigned RNA; note = Description of Unknown: target sequence
ttggtaatgcctgattcaca

SEQ ID NO: 4617 - RNA, 20 nt, unidentified
  source 1..20: mol_type = unassigned RNA; note = Description of Unknown: target sequence
cctgattcacaactttgaga

SEQ ID NO: 4618 - RNA, 20 nt, unidentified
  source 1..20: mol_type = unassigned RNA; note = Description of Unknown: target sequence
actttgagaaggtagcactg

SEQ ID NO: 4619 - RNA, 20 nt, unidentified
  source 1..20: mol_type = unassigned RNA; note = Description of Unknown: target sequence
agcactggagagaattggaa

SEQ ID NO: 4620 - RNA, 20 nt, unidentified
  source 1..20: mol_type = unassigned RNA; note = Description of Unknown: target sequence
agaattggaatgggtggcgg

SEQ ID NO: 4621 - RNA, 20 nt, unidentified
  source 1..20: mol_type = unassigned RNA; note = Description of Unknown: target sequence
tgggtggcggtaattggtga

SEQ ID NO: 4622 - RNA, 20 nt, unidentified
  source 1..20: mol_type = unassigned RNA; note = Description of Unknown: target sequence
ttggtgatacttctttgaat

SEQ ID NO: 4623 - RNA, 20 nt, unidentified
  source 1..20: mol_type = unassigned RNA; note = Description of Unknown: target sequence
tctttgaatgtagatttcca

SEQ ID NO: 4624 - RNA, 20 nt, unidentified
  source 1..20: mol_type = unassigned RNA; note = Description of Unknown: target sequence
tagatttccaatcacatctt

SEQ ID NO: 4625 - RNA, 20 nt, unidentified
  source 1..20: mol_type = unassigned RNA; note = Description of Unknown: target sequence
tcacatctttagtgtctgaa

SEQ ID NO: 4626 - RNA, 20 nt, unidentified
  source 1..20: mol_type = unassigned RNA; note = Description of Unknown: target sequence
tgtctgaatatatccaaatg

SEQ ID NO: 4627 - RNA, 20 nt, unidentified
  source 1..20: mol_type = unassigned RNA; note = Description of Unknown: target sequence
tatccaaatgttttaggatg

SEQ ID NO: 4628 - RNA, 20 nt, unidentified
  source 1..20: mol_type = unassigned RNA; note = Description of Unknown: target sequence
ttttaggatgtatgttactt

SEQ ID NO: 4629 - RNA, 20 nt, unidentified
  source 1..20: mol_type = unassigned RNA; note = Description of Unknown: target sequence
tgttacttcttagagagaaa

SEQ ID NO: 4630 - RNA, 20 nt, unidentified
  source 1..20: mol_type = unassigned RNA; note = Description of Unknown: target sequence
tagagagaaataaagcattt

SEQ ID NO: 4631 - DNA, 10 bp, synthetic construct
  source 1..10: mol_type = other DNA; note = Description of Artificial Sequence: Synthetic oligonucleotide
acaatctcag
